(19) United States
(12) Patent Application Publication
(10) Pub. No.: US 2009/0081243 A1
(43) Pub. Date: Mar. 26, 2009

(54) Agents and methods for diagnosing stress

(75) Inventors: Richard Bruce Brandon, Queensland (AU); Mervyn Rees Thomas, Queensland (AU)

Correspondence Address: PROSKAUER ROSE LLP, 1001 PENNSYLVANIA AVE, N.W.,, SUITE 400 SOUTH, WASHINGTON, DC, 20004, US

(73) Assignee: ATHLOMICS PTY LTD., Toowong, Queensland (AU)

(21) Appl. No.: 11/628,447

(22) PCT Filed: Jun. 3, 2005
(86) PCT No.: PCT/AU05/00794

§ 371 Date: Apr. 25, 2008

Related U.S. Application Data
(60) Provisional application No. 60/576,285, filed on Jun. 3, 2004.

(30) Foreign Application Priority Data
Jun. 4, 2004 (AU) 2004903003

(51) Int. Cl. C12Q 1/68; G01N 33/53; G01N 33/543; C40B 30/04; A61K 39/00; C07H 21/00; C12N 15/63

(52) U.S. Cl. 424/184.1; 435/6; 436/501; 435/7.1; 506/9; 536/23.1; 435/320.1; 435/325; 536/24.3

(57) ABSTRACT

The present invention discloses molecules and assays for qualitatively or quantitatively determining the effect of stress on the immune system, the susceptibility to developing disease or illness through immune system dysfunction as a result of stress, and for monitoring the ability of an animal to cope with stress. The invention is useful inter alia in measuring response to immunomodulatory therapies, and monitoring the immune response to natural disease under stressful conditions.

### FIELD OF THE INVENTION

[0001] This invention relates generally to methods and agents for determining the status of the immune system. More particularly, the present invention relates to molecules and assays for qualitatively or quantitatively determining the effect of stress on the immune system, the susceptibility to developing disease or illness through immune system dysfunction as a result of stress, and for monitoring the ability of an animal to cope with stress. The invention is useful inter alia in measuring response to immunomodulatory therapies, and monitoring the immune response to natural disease under stressful conditions. In certain embodiments, the invention is useful for monitoring animals in athletic training, for measuring the effects of aging on ability to respond to stress and external stressors, and for enabling better treatment and management decisions to be made in animals at risk of exposure to disease, or susceptible to disease through the effects of stress.

### BACKGROUND OF THE INVENTION

[0002] The immune system functions to protect an organism from foreign invasion and insults. The host immune system of mammals can be functionally divided into adaptive and innate components. Innate immunity is often the first line of defense to external insults and consists of natural barriers, such as keratinous surfaces, secretions and chemicals, for example skin, mucous, lysozyme and acute phase proteins. The innate immune system can be found in most organisms, is non-specific, and many defense molecules that are part of the innate immune system are evolutionally conserved across a broad range of species (e.g., complement components appear early in evolution in invertebrates).

[0003] The adaptive immune system produces a specific response and “remembers” an infectious or invading agent to enable the host to engender an anamnestic response upon a subsequent challenge. The adaptive immune system can also be functionally-divided into humoral and cellular components. The humoral component consists of soluble factors, and in mammals this consists of antibodies. Cells of the immune system of higher organisms consist of the lymphoid or myeloid lines. Lymphoid cells differentiate in the thymus (T cells) or bone marrow (B cells). B cells and T cells are morphologically identical. Myeloid cells are phagocytes and other cells such as platelets and mast cells. Phagocytes are either monocytes or polymorphonuclear cells. [For a general review of the immune system and its cellular and humoral components, see “Essential Immunology,” 10^{th} edition, Roitt and Delves, Blackwell Publishing 2001; and “Immunobiology. The Immune system in Health and Disease,” 4^{th} edition, Janeway et al., Garland Publishing 1999].

[0004] Functional studies of the immune system of mammals constitute a vast body of literature and there are numerous tests available to measure the functional capabilities of the immune system. The humoral immune system is more amenable to functional testing as compared to the cellular immune system. For example, antibodies bind specifically to their target molecules and can be measured directly in tests such as antibody diffusion and precipitation assays, enzyme-linked immunosorbent assays, or used to detect the presence of invading organisms in antigen capture assays.

[0005] The function of the cellular immune system is more difficult to measure and often involves simple counting of the numbers of various subpopulations of cells using stains or specific antibodies to cell surface proteins. For example, one of the most common blood tests in medicine is a complete blood count (CBC) that measures red and white blood cell and platelet numbers. A differential white cell count uses Wright stain to enable the enumeration of lymphocytes, neutrophils, basophils, eosinophils and monocytes. Infection with bacteria often results in increased numbers of neutrophils in peripheral blood samples, and parasitic infections often results in increased numbers of eosinophils. However, counting the numbers of white blood cell types in a peripheral blood sample is often a poor indicator of the functional capabilities of the immune system, it is non-specific (not capable of determining the nature of infection or insult) and lymphocytes of the B and T cell lineage cannot be distinguished.

[0006] B lymphocytes produce antibodies and T lymphocytes are one of the main regulators and effectors of the immune system. Various subpopulations of B and T cells can be distinguished on the basis of different proteins (markers) on their cell surface. B cells express immunoglobulin (antibody) proteins on their cell surface and T cells express various markers depending upon their stage of development and function. Many different reagents (often antibodies) have been developed to differentiate subpopulations of T and B cells in humans and experimental animal species and many can be bought commercially from companies such as Alexis Corporation (www.alexis-corp.com). Again, simply counting the numbers of B and T cells (including subpopulations) is not informative on the functional capabilities of the cells. The preparation of reagents for detecting cell surface markers is also laborious and a highly specialized activity.

[0007] There are more direct methods of measuring immune cell function, including; plaque forming, chemotaxis, random migration, superoxide anion release, concentration of ATP in circulating CD4⁺ cells following in vitro stimulation with phytohaemagglutinin, and release of fluorescent dye from target cells assays. Many of these tests are laborious, require prior cell preparation and purification methods (often affecting the results of subsequent assays), and only measure the function of one particular subset of cells.

[0008] In summary, there currently exists a need for more effective modalities for measuring the functional capabilities of the immune system, and particularly the cellular immune system.

[0009] Athletic performance animals are unable to communicate their well-being to human owners or trainers. In addition, human athletes are often unaware of their well-being (due to heavy training) or are unable to communicate this effectively to trainers or medical practitioners. Therefore, there is also a need for more effective methods for monitoring the functional capabilities of the cellular immune system, especially in athletic performance animals.

[0010] It is almost 70 years since it was first recognized that stress can activate a physiological response that may be beneficial or damaging to the body (Seyle H.1936, Nature 138:32). Stress is a physical, chemical or emotional factor that causes bodily or mental tension and may be a factor in disease causation. A publication by Pedersen et al. (1994, Inter J Sports Med. 15:5116-5121) provides a review of work conducted in the area of stress and disease.

[0011] In recent years, rapid advances in the field of immunology have generated intense interest in the interaction between stress induced by psychosocial, nutritional and physical factors and the immune system. A major premise of this work is that stress may enhance vulnerability to disease by exerting an immunosuppressive effect. This may especially be true of diseases intimately connected with immunologic mechanisms such as infection, malignancy and autoimmune disease.

[0012] Studies demonstrating immune alterations in stress encompass a number of models in which most types of experimental and naturally occurring stresses have been associated with alteration of the components of the immune system. Some of the earliest work was conducted by the United States National Aeronautic Space Administration (NASA). The NASA studies showed that white blood cells and T-lymphocytes were elevated during the splash-down phase of space flight. However, there was impairment in the lymphoproliferative response to mitogenic stimulation during the first three (3) days after return to earth. A slight decrease in the stimulation response of lymphocytes was also observed prior to launch, possibly due to anticipation. A general overview of stress and immune function can be found in “Stress, Immunity and Illness—A Review”, authored by Dorian and Garfinkel, Psychological Medicine, 17:393407 (1987).

[0013] Physical activity and exercise are also known to produce a variety of alterations to the immune system. The effects of vigorous exercise appear to depress immune function and may compromise host defenses against upper respiratory tract infections. Epidemiological studies have generally shown a greater risk of upper respiratory tract infections with vigorous levels of exercise. See Heath et al., 1992 Sports Medicine 14(6) 353-365.

[0014] In addition to physical activity and exercise, stress can be evinced by external factors such as trauma (physical), major life events, physical health status and lifestyle. The way in which these external factors are perceived and the way in which the body adjusts influence the ultimate physiological response. The body's response to stress is handled by an allostatic system (adaptive) consisting primarily of the sympathetic nervous system and the hypothalamic, pituitary, adrenal axis (HPA axis) (McEwen B. 1998, New England Journal of Medicine, 338:171-179). The term “allostatic load” refers to the amount of physiological response resulting from the balance between the initiation of a complex response and the shutting down of this response. Allostatic load can result from frequent stress, lack of adaptation to stress, inability to turn off an allostatic response, and lack of allostatic response in one system resulting in an increased response in another.

[0015] There is strong evidence to suggest that allostatic load leads to increased susceptibility to disease, risk of contracting disease and increased disease incidence. For example, stress induced increases in blood pressure can trigger myocardial infarction in humans and atherosclerosis in primates (Muller et al., 1989 Circulation 79:733-743, and Kaplan et al., 1991 Circulation, 84 Suppl VI:VI-23-VI-32,). Intense athletic training increases allostatic load resulting in weight loss, amenorrhoea and anorexia nervosa (Boyar et al., 1977 New Engl J Med. 296:190-193, and Loucks et al., 1989 J Clin. Endocrinol. Metabol. 68:402-411). Repeated social defeat (stressor) in mice is associated with (amongst other findings) increased plasma concentrations of corticosterone, which is a known immunosuppressant (Stark et al., Am. J. Physiol. Regul. Integrr. Comp. Physiol. 280: R1799-R1805). Age is correlated with the ability to turn off the HPA axis, and prolonged stimulation of physiological systems through the HPA axis can result in hippocampus damage and consequent cognitive deficits (Lupien et al., 1994 J Neurosci. 14:2893-2903). In Lewis rats, genetically determined to have hyporesponsiveness of the HPA axis, increased inflammatory responses result in an increased incidence of autoimmune and inflammatory disturbances (Sternburg et al., 1989 Proc. Natl. Acad. Sci (USA) 86: 4771-4775). Low HPA responsiveness is also considered to be involved in human fibromyalgia (Crofford et al., 1994 Arthritis Rheum. 37:1583-1592), chronic fatigue syndrome (Poteliakhoff A. 1981 J Psychosom. Res. 25:91-95), infant atopic dermatitis (Buske-Kirschbaum et al., 1997 Psychosom med. 59:419-426) and post-traumatic stress disorder (Yehuda et al., 1991 Bio. Psychiatry 30:1031-1048).

[0016] Approximating allostatic load has been attempted by using measures of metabolic and cardiovascular physiology including, systolic blood pressure, overnight urinary cortisol and catecholamine excretion, ratio of waist to hip measurement, glycosylated hemoglobin value, ratio of serum high density lipoprotein in the total serum cholesterol concentration, serum concentration of dehydroepiandrosterone sulfate, and serum concentration of high density lipoprotein cholesterol. Patients with a lower allostatic score from measuring these parameters had higher physical and mental functioning and a lower incidence of cardiovascular disease, hypertension and diabetes (Seeman et al., 1997 Arch. Intern. Med. 157:2259-2268). High serum fibrinogen concentrations have also been correlated to increased risk of coronary heart disease (Markowe et al., 1985 British Med. J. 291:1312-1314). In addition it has been noted that stress induces atrophy of the pyramidal neurones in the CA3 region of the hippocampus that can be detected using magnetic resonance imaging (Sapolsky R. M. 1996 Science 273:749-750.). These measures require multiple separate assays, are expensive and often laborious, and only provide an approximation of allostatic load.

[0017] In summary there is a need for more effective processes for measuring allostatic load.

[0018] It is well known that stress affects the immune system (Hawkley and Cacioppo, 2004 Brain Behav. Imm. 18:114-119; Engler et al., 2004 J Neuroimm. 148:106-115; Woods et al., 2003 Brain Behav. Imm. 17: 384-392; Mars et al, 1998 Biochem Biophys. Res. Comm. 249: 366-370; Bierhaus et al., 2003 Proc. Natl. Acad. Sci. (USA) 100(4): 1920-1925; Horohov et al., 1996 Vet Immunol. Immunopath. 53:221-233). Stress acts on the immune system mainly through the sympathetic nervous system and HPA axis causing the release of catecholamines, corticotrophin and cortisol (an example of a steroid). These molecules have known immunomodulatory effects but their mechanism of action is not fully understood. For example, glucocorticoids (steroids) such as cortisol bind to steroid receptors on the outside of cells and are then transported directly to the cell nucleus. Once inside the nucleus, steroid hormones can modulate gene expression, and hence immune function, through steroid responsive elements upstream of gene coding regions (Geng and Vedeckis, 2004 Mol. Endocrinol. 18(4):912-924). For the purposes of its effects on the immune system, stress can be classified into acute (once over a period of less than say two days) and chronic forms (persistent stress over a period of several days or months). Acute stress has been demonstrated to enhance the immune system by redistributing white blood cells from blood to various body compartments such as the skin, lymph nodes and bone marrow (Dhabhar et al., 1995 J. Immunol. 154:5511-5527) the effect of which is partly due to release of endogenous glucocorticoids. The affect of acute stress has been reported to last for 3-5 days (Dhabhar et al., 1996 J Immunol. 157:1638-1644.). On the other hand, chronic stress elicits the HPA axis and the autonomic nervous system and reduces cellular immune responses and increases susceptibility to disease (McEwen et al., 1997 Brain Res. Rev. 23:79-113; Cohen et al., 1992 Psychol. Sci. 3:301-304; Cohen et al., 1993 JAMA, 277:1940-1944; Peijie et al., 2003 Life Sciences 72:2255-2262).

[0019] In summary, there is a need for better modalities for measuring and monitoring the effects of allostatic load on the function of the immune system.

### SUMMARY OF THE INVENTION

[0020] The present invention represents a significant advance over current technologies for quantifying allostatic load and for measuring and monitoring immune function. It is predicated in part on measuring the level of certain functional markers in cells, especially circulating leukocytes, of the host. More particularly, the present invention relates to molecules and assays, which are useful in screening and monitoring animals for the presence or risk of developing disease or illness through immune system dysfunction as a result of stress, in determining the ability of an animal to cope with, or adapt to, external stressors, and in monitoring immune function when administering immune-modulating drugs. The invention has practical use in monitoring animals under stress, especially those in athletic training, in measuring the effects of aging on the ability to respond to external stressors, and in enabling better treatment and management decisions to be made in animals at risk of exposure to disease, or susceptible to disease through the effects of stress. In certain embodiments, the invention has practical applications in measuring the response to vaccination or immune-modifying therapies, for example, in animals under stress, which may not develop an appropriate protective response to vaccination or therapy. In other embodiments, the invention has practical use in monitoring the immune response to natural disease when an animal is subject to stressful conditions or at risk due to inappropriate response to stress. This represents a significant and unexpected advance in the screening, monitoring and management of animals under stress.

[0021] Thus, the present invention addresses the problem of detecting the presence, absence or degree of a physiological stress response or of assessing well being including the function of the immune system by detecting, for example, a differential gene expression pattern that may be measured in host cells. Advantageous embodiments involve monitoring the expression of certain genes in peripheral leukocytes of the immune system, which may be reflected in changing patterns of RNA levels or protein production that correlate with allostatic stress load or with an immune-modulating event.

[0022] Accordingly, in one aspect, the present invention provides methods for determining the presence or degree of a physiological response to stress or a related condition in a test subject. These methods generally comprise detecting in the subject aberrant expression of at least one gene (also referred to herein as a “stress marker gene”) selected from the group consisting of: (a) a gene comprising a nucleotide sequence that shares at least 50% (and at least 51% to at least 99% and all integer percentages in between) sequence identity with the sequence set forth in any one of SEQ ID NO: 1, 3, 4, 5, 7, 9, 11, 13, 15, 16, 17, 19, 21, 23, 24, 25, 26, 28, 29, 30, 32, 33, 34, 35, 37, 38, 39, 40, 41, 42, 44, 46, 48, 50, 51, 52, 54, 55, 56, 57, 59, 62, 63, 64, 66, 68, 70, 71, 73, 75, 77, 79, 81, 83, 85, 87, 89, 90, 91, 92, 93, 95, 96, 97, 99, 101, 103, 105, 107, 108, 109, 111, 113, 115, 117, 118, 119, 121, 123, 125, 126, 127, 129, 130, 131, 133, 135, 137, 139, 141, 143, 144, 145, 147, 148, 150, 151, 153, 155, 156, 158, 160, 161, 163, 164, 165, 167, 169, 170, 171, 173, 175, 176, 178, 180, 182, 184, 185, 186, 187, 188, 190, 192, 194, 195, 196, 198, 200, 202, 204, 206, 208, 210, 212, 214, 216, 218, 220, 222, 224, 226, 228, 230, 232, 233, 234, 236, 238, 239, 240, 241, 242, 243, 244, 246 or 248, or a complement thereof; (b) a gene comprising a nucleotide sequence that encodes a polypeptide comprising the amino acid sequence set forth in any one of SEQ ID NO: 2, 6, 8, 10, 12, 14, 18, 20, 22, 27, 31, 36, 43, 45, 47, 49, 53, 58, 60, 61, 65, 67, 69, 72, 74, 76, 78, 80, 82, 84, 86, 88, 94, 98, 100, 102, 104, 106, 110, 112, 114, 116, 120, 122, 124, 128, 132, 134, 136, 138, 140, 142, 146, 149, 152, 154, 157, 159, 162, 166, 168, 172, 174, 177, 179, 181, 183, 189, 191, 193, 197, 199, 201, 203, 205, 207, 209, 211, 213, 215, 217, 219, 221, 223, 225, 227, 229, 231, 235, 237, 245, 247 or 249; (c) a gene comprising a nucleotide sequence that encodes a polypeptide that shares at least 50% (and at least 51% to at least 99% and all integer percentages in between) sequence similarity with at least a portion of the sequence set forth in SEQ ID NO: 2, 6, 8, 10, 12, 14, 18, 20, 22, 27, 31, 36, 43, 45, 47, 49, 53, 58, 60, 61, 65, 67, 69, 72, 74, 76, 78, 80, 82, 84, 86, 88, 94, 98, 100, 102, 104, 106, 110, 112, 114, 116, 120, 122, 124, 128, 132, 134, 136, 138, 140, 142, 146, 149, 152, 154, 157, 159, 162, 166, 168, 172, 174, 177, 179, 181, 183, 189, 191, 193, 197, 199, 201, 203, 205, 207, 209, 211, 213, 215, 217, 219, 221, 223, 225, 227, 229, 231, 235, 237, 245, 247 or 249, wherein the portion comprises at least 15 contiguous amino acid residues of that sequence; and (d) a gene comprising a nucleotide sequence that hybridizes to the sequence of (a), (b), (c) or a complement thereof, under at least low, medium or high stringency conditions. In accordance with the present invention, these stress marker genes are aberrantly expressed in animals with a physiological response to stress or with an allostatic load. Suitably, the related condition is immunodepression.

[0023] Suitably, the presence of the physiological response to stress or related condition is associated with psychological stress or physical stress (e.g., physical duress such as athletic training and physical trauma). Illustrative psychological conditions include depression, generalized anxiety disorder, post traumatic stress disorder, panic, chronic fatigue, myalgic encephalopathy, stress through restraint, sleep deprivation, overeating and behavioral (operant) conditioning. Other psychological conditions, especially relating to veterinary applications, include, but are not limited to, stress related to confinement, sheering, shipping or human-animal interaction. Illustrative examples of physical stress include physical duress such as athletic training and physical trauma.

[0024] As used herein, polynucleotide expression products of stress marker genes are referred to as “stress marker polynucleotides.” Polypeptide expression products of the stress marker genes are referred to herein as “stress marker polypeptides.”

[0025] Thus, in some embodiments, the methods comprise detecting aberrant expression of a stress marker polynucleotide selected from the group consisting of (a) a polynucleotide comprising a nucleotide sequence that shares at least 50% (and at least 51% to at least 99% and all integer percentages in between) sequence identity with the sequence set forth in any one of SEQ ID NO: 1, 3, 4, 5, 7, 9, 11, 13, 15, 16, 17, 19, 21, 23, 24, 25, 26, 28, 29, 30, 32, 33, 34, 35, 37, 38, 39, 40, 41, 42, 44, 46, 48, 50, 51, 52, 54, 55, 56, 57, 59, 62, 63, 64, 66, 68, 70, 71, 73, 75, 77, 79, 81, 83, 85, 87, 89, 90, 91, 92, 93, 95, 96, 97, 99, 101, 103, 105, 107, 108, 109, 111, 113, 115, 117, 118, 119, 121, 123, 125, 126, 127, 129, 130, 131, 133, 135, 137, 139, 141, 143, 144, 145, 147, 148, 150, 151, 153, 155, 156, 158, 160, 161, 163, 164, 165, 167, 169, 170, 171, 173, 175, 176, 178, 180, 182, 184, 185, 186, 187, 188, 190, 192, 194, 195, 196, 198, 200, 202, 204, 206, 208, 210, 212, 214, 216, 218, 220, 222, 224, 226, 228, 230, 232, 233, 234, 236, 238, 239, 240, 241, 242, 243, 244, 246 or 248, or a complement thereof; (b) a polynucleotide comprising a nucleotide sequence that encodes a polypeptide comprising the amino acid sequence set forth in any one of SEQ ID NO: 2, 6, 8, 10, 12, 14, 18, 20, 22, 27, 31, 36, 43, 45, 47, 49, 53, 58, 60, 61, 65, 67, 69, 72, 74, 76, 78, 80, 82, 84, 86, 88, 94, 98, 100, 102, 104, 106, 110, 112, 114, 116, 120, 122, 124, 128, 132, 134, 136, 138, 140, 142, 146, 149, 152, 154, 157, 159, 162, 166, 168, 172, 174, 177, 179, 181, 183, 189, 191, 193, 197, 199, 201, 203, 205, 207, 209, 211, 213, 215, 217, 219, 221, 223, 225, 227, 229, 231, 235, 237, 245, 247 or 249; (c) a polynucleotide comprising a nucleotide sequence that encodes a polypeptide that shares at least 50% (and at least 51% to at least 99% and all integer percentages in between) sequence similarity with at least a portion of the sequence set forth in SEQ ID NO: 2, 6, 8, 10, 12, 14, 18, 20, 22, 27, 31, 36, 43, 45, 47, 49, 53, 58, 60, 61, 65, 67, 69, 72, 74, 76, 78, 80, 82, 84, 86, 88, 94, 98, 100, 102, 104, 106, 110, 112, 114, 116, 120, 122, 124, 128, 132, 134, 136, 138, 140, 142, 146, 149, 152, 154, 157, 159, 162, 166, 168, 172, 174, 177, 179, 181, 183, 189, 191, 193, 197, 199, 201, 203, 205, 207, 209, 211, 213, 215, 217, 219, 221, 223, 225, 227, 229, 231, 235, 237, 245, 247 or 249, wherein the portion comprises at least 15 contiguous amino acid residues of that sequence; and (d) a polynucleotide comprising a nucleotide sequence that hybridizes to the sequence of (a), (b), (c) or a complement thereof, under at least low stringency conditions.

[0026] In other embodiments, the methods comprise detecting aberrant expression of a stress marker polypeptide selected from the group consisting of: (i) a polypeptide comprising an amino acid sequence that shares at least 50% (and at least 51% to at least 99% and all integer percentages in between) sequence similarity with the sequence set forth in any one of SEQ ID NO: 2, 6, 8, 10, 12, 14, 18, 20, 22, 27, 31, 36, 43, 45, 47, 49, 53, 58, 60, 61, 65, 67, 69, 72, 74, 76, 78, 80, 82, 84, 86, 88, 94, 98, 100, 102, 104, 106, 110, 112, 114, 116, 120, 122, 124, 128, 132, 134, 136, 138, 140, 142, 146, 149, 152, 154, 157, 159, 162, 166, 168, 172, 174, 177, 179, 181, 183, 189, 191, 193, 197, 199, 201, 203, 205, 207, 209, 211, 213, 215, 217, 219, 221, 223, 225, 227, 229, 231, 235, 237, 245, 247 or 249; (ii) a polypeptide comprising a portion of the sequence set forth in any one of SEQ ID NO: 2, 6, 8, 10, 12, 14, 18, 20, 22, 27, 31, 36, 43, 45, 47, 49, 53, 58, 60, 61, 65, 67, 69, 72, 74, 76, 78, 80, 82, 84, 86, 88, 94, 98, 100, 102, 104, 106, 110, 112, 114, 116, 120, 122, 124, 128, 132, 134, 136, 138, 140, 142, 146, 149, 152, 154, 157, 159, 162, 166, 168, 172, 174, 177, 179, 181, 183, 189, 191, 193, 197, 199, 201, 203, 205, 207, 209, 211, 213, 215, 217, 219, 221, 223, 225, 227, 229, 231, 235, 237, 245, 247 or 249, wherein the portion comprises at least 5 contiguous amino acid residues of that sequence; (iii) a polypeptide comprising an amino acid sequence that shares at least 30% (and at least 31% to at least 99% and all integer percentages in between) similarity with at least 15 contiguous amino acid residues of the sequence set forth in any one of SEQ ID NO: 2, 6, 8, 10, 12, 14, 18, 20, 22, 27, 31, 36, 43, 45, 47, 49, 53, 58, 60, 61, 65, 67, 69, 72, 74, 76, 78, 80, 82, 84, 86, 88, 94, 98, 100, 102, 104, 106, 110, 112, 114, 116, 120, 122, 124, 128, 132, 134, 136, 138, 140, 142, 146, 149, 152, 154, 157, 159, 162, 166, 168, 172, 174, 177, 179, 181, 183, 189, 191, 193, 197, 199, 201, 203, 205, 207, 209, 211, 213, 215, 217, 219, 221, 223, 225, 227, 229, 231, 235, 237, 245, 247 or 249; and (iv) a polypeptide comprising a portion of the sequence set forth in any one of SEQ ID NO: 2, 6, 8, 10, 12, 14, 18, 20, 22, 27, 31, 36, 43, 45, 47, 49, 53, 58, 60, 61, 65, 67, 69, 72, 74, 76, 78, 80, 82, 84, 86, 88, 94, 98, 100, 102, 104, 106, 110, 112, 114, 116, 120, 122, 124, 128, 132, 134, 136, 138, 140, 142, 146, 149, 152, 154, 157, 159, 162, 166, 168, 172, 174, 177, 179, 181, 183, 189, 191, 193, 197, 199, 201, 203, 205, 207, 209, 211, 213, 215, 217, 219, 221, 223, 225, 227, 229, 231, 235, 237, 245, 247 or 249, wherein the portion comprises at least 5 contiguous amino acid residues of that sequence and is immuno-interactive with an antigen-binding molecule that is immuno-interactive with a sequence of (i), (ii) or (iii).

[0027] Typically, aberrant expression of a stress marker gene is detected by: (1) measuring in a biological sample obtained from the subject the level or functional activity of an expression product of at least one stress marker gene and (2) comparing the measured level or functional activity of each expression product to the level or functional activity of a corresponding expression product in a reference sample obtained from one or more normal subjects or from one or more subjects not under stress, wherein a difference in the level or functional activity of the expression product in the biological sample as compared to the level or functional activity of the corresponding expression product in the reference sample is indicative of the presence of a physiological response to stress. In some embodiments, the method further comprises determining the degree of stress response (or stress level) or the degree of immunomodulation when the measured level or functional activity of the or each expression product is different than the measured level or functional activity of the or each corresponding expression product. In these embodiments, the difference typically represents an at least about 10%, 20%, 30%, 40%, 50%, 60%, 70%, 80% or 90%, or even an at least about 100%, 200%, 300%, 400%, 500%, 600%, 700%, 800%, 900% or 1000% increase, or an at least about 10%, 20%, 30% 40%, 50%, 60%, 70%, 80%, 90%, 92%, 94%, 96%, 97%, 98% or 99%, or even an at least about 99.5%, 99.9%, 99.95%, 99.99%, 99.995% or 99.999% decrease in the level or functional activity of an individual expression product as compared to the level or function activity of an individual corresponding expression product, which is hereafter referred to as “aberrant expression.” In illustrative examples of this type, the presence of a physiological response to stress is determined by detecting a decrease in the level or functional activity of at least one stress marker polynucleotide selected from (a) a polynucleotide comprising a nucleotide sequence that shares at least 50% (and at least 51% to at least 99% and all integer percentages in between) sequence identity with the sequence set forth in any one of SEQ ID NO: 1, 3, 4, 7, 9, 11, 19, 21, 24, 25, 33, 34, 38, 39, 40, 41, 42, 50, 51, 56, 57, 59, 62, 63, 66, 70, 71, 73, 75, 79, 81, 83, 89, 90, 91, 92, 93, 97, 99, 105, 107, 108, 111, 119, 121, 122, 123, 129, 130, 137, 139, 140, 141, 142, 143 or 185, or a complement thereof; (b) a polynucleotide comprising a nucleotide sequence that encodes a polypeptide comprising the amino acid sequence set forth in any one of SEQ ID NO: 2, 8, 10, 12, 20, 22, 43, 58, 60, 67, 71, 72, 74, 76, 80, 82, 84, 94, 98, 100, 106, 112, 120, 122, 123, 124 or 138; (c) a polynucleotide comprising a nucleotide sequence that encodes a polypeptide that shares at least 50% (and at least 51% to at least 99% and all integer percentages in between) sequence similarity with at least a portion of the sequence set forth in SEQ ID NO: 2, 8, 10, 12, 20, 22, 43, 58, 60, 67, 71, 72, 74, 76, 80, 82, 84, 94, 98, 100, 106, 112, 120, 122, 123, 124 or 138, wherein the portion comprises at least 15 contiguous amino acid residues of that sequence; and (d) a polynucleotide comprising a nucleotide sequence that hybridizes to the sequence of (a), (b), (c) or a complement thereof, under at least low, medium, or high stringency conditions.

[0028] In other illustrative examples, the presence of a physiological response to stress is determined by detecting an increase in the level or functional activity of at least one stress marker polynucleotide selected from (a) a polynucleotide comprising a nucleotide sequence that shares at least 50% (and at least 51% to at least 99% and all integer percentages in between) sequence identity with the sequence set forth in any one of SEQ ID NO: 5, 13, 15, 16, 17, 23, 26, 28, 29, 30, 32, 35, 37, 44, 46, 48, 52, 54, 55, 64, 68, 77, 85, 87, 95, 96, 101, 103, 113, 115, 117, 118, 125, 126, 131, 133, 135, 144, 145, 147, 148, 150, 151, 153, 155, 156, 158, 160, 161, 163, 164, 165, 167, 169, 170, 171, 173, 175, 176, 178, 180, 182, 183, 184, 186, 187, 188, 190, 192, 194, 195, 196, 198, 200, 202, 204, 206 or 210, or a complement thereof; (b) a polynucleotide comprising a nucleotide sequence that encodes a polypeptide comprising the amino acid sequence set forth in any one of SEQ ID NO: 6, 14, 18, 27, 31, 36, 45, 47, 49, 53, 65, 69, 78, 86, 88, 102, 104, 114, 116, 132, 134, 136, 146, 149, 152, 154, 157, 159, 162, 166, 168, 172, 174, 177, 179, 181, 189, 191, 193, 197, 199, 201, 203, 205, 207 or 211; (c) a polynucleotide comprising a nucleotide sequence that encodes a polypeptide that shares at least 50% (and at least 51% to at least 99% and all integer percentages in between) sequence similarity with at least a portion of the sequence set forth in SEQ ID NO: 6, 14, 18, 27, 31, 36, 45, 47, 49, 53, 65, 69, 78, 86, 88, 102, 104, 114, 116, 132, 134, 136, 146, 149, 152, 154, 157, 159, 162, 166, 168, 172, 174, 177, 179, 181, 189, 191, 193, 197, 199, 201, 203, 205, 207 or 211, wherein the portion comprises at least 15 contiguous amino acid residues of that sequence; and (d) a polynucleotide comprising a nucleotide sequence that hybridizes to the sequence of (a), (b), (c) or a complement thereof, under at least low, medium, or high stringency conditions.

[0029] In some embodiments, the method further comprises determining the absence of a physiological response to stress when the measured level or functional activity of the or each expression product is the same as or similar to the measured level or functional activity of the or each corresponding expression product. In these embodiments, the measured level or functional activity of an individual expression product varies from the measured level or functional activity of an individual corresponding expression product by no more than about 20%, 18%, 16%, 14%, 12%, 10%, 9%, 8%, 7%, 6%, 5%, 4%, 3%, 2%, 1% or 0.1%, which is hereafter referred to as “normal expression.”

[0030] In some embodiments, the methods comprise measuring the level or functional activity of individual expression products of at least about 2, 3, 4, 5, 6, 7, 8, 9, 10, 11, 12, 13, 14, 15, 16, 17, 18, 19, 20, 21, 22, 23, 24, 25, 26, 27, 28, 29, 30, 31, 32, 33, 34, 35, 36, 37, 38, 39, 40, 41, 42, 43, 44 or 45 stress marker genes. For example, the methods may comprise measuring the level or functional activity of a stress marker polynucleotide either alone or in combination with as much as 44, 43, 42, 41, 40, 39, 38, 37, 36, 35, 34, 33, 32, 31, 30, 29, 28, 27, 26, 25, 24, 23, 22, 21, 20, 19, 18, 17, 16, 15, 14, 13, 12, 11, 10, 9, 8, 7, 6, 5, 4, 3, 2 or 1 other stress marker polynucleotide(s). In another example, the methods may comprise measuring the level or functional activity of a stress marker polypeptide either alone or in combination with as much as 44, 43, 42, 41, 40, 39, 38, 37, 36, 35, 34, 33, 32, 31, 30, 29, 28, 27, 26, 25, 24, 23, 22, 21, 20, 19, 18, 17, 16, 15, 14, 13, 12, 11, 10, 9, 8, 7, 6, 5, 4, 3, 2 or 1 other stress marker polypeptides(s). In illustrative examples of this type, the methods comprise measuring the level or functional activity of individual expression products of at least 1, 2, 3, 4, 5 or 6 stress marker genes that have a very high correlation with the presence or risk of a physiological response to stress (hereafter referred to as “level one correlation stress marker genes”), representative examples of which include, but are not limited to, (a) a polynucleotide comprising a nucleotide sequence that shares at least 50% (and at least 51% to at least 99% and all integer percentages in between) sequence identity with the sequence set forth in any one of SEQ ID NO: 89, 90, 103, 125, 126, 163, 178, 182, 184 or 190, or a complement thereof; (b) a polynucleotide comprising a nucleotide sequence that encodes a polypeptide comprising the amino acid sequence set forth in any one of SEQ ID NO: 104, 179, 183 or 189; (c) a polynucleotide comprising a nucleotide sequence that encodes a polypeptide that shares at least 50% (and at least 51% to at least 99% and all integer percentages in between) sequence similarity with at least a portion of the sequence set forth in SEQ ID NO: 104, 179, 183 or 189, wherein the portion comprises at least 15 contiguous amino acid residues of that sequence; and (d) a polynucleotide comprising a nucleotide sequence that hybridizes to the sequence of (a), (b), (c) or a complement thereof, under at least low, medium, or high stringency conditions.

[0031] In other illustrative examples, the methods comprise measuring the level or functional activity of individual expression products of at least 1, 2, 3, 4, 5, 6, 7 or 8 stress marker genes that have a high correlation with the presence or risk of a physiological response to stress (hereafter referred to as “level two correlation stress marker genes”), representative examples of which include, but are not limited to, (a) a polynucleotide comprising a nucleotide sequence that shares at least 50% (and at least 51% to at least 99% and all integer percentages in between) sequence identity with the sequence set forth in any one of SEQ ID NO: 17, 23, 44, 52, 133, 135, 144, 147, 148, 151, 155, 192, 196, 202 or 206, or a complement thereof; (b) a polynucleotide comprising a nucleotide sequence that encodes a polypeptide comprising the amino acid sequence set forth in any one of SEQ ID NO: 18, 20, 45, 53, 134, 136, 149, 152, 193, 197 or 207; (c) a polynucleotide comprising a nucleotide sequence that encodes a polypeptide that shares at least 50% (and at least 51% to at least 99% and all integer percentages in between) sequence similarity with at least a portion of the sequence set forth in SEQ ID NO: 18, 20, 45, 53, 134, 136, 149, 152, 193, 197 or 207, wherein the portion comprises at least 15 contiguous amino acid residues of that sequence; and (d) a polynucleotide comprising a nucleotide sequence that hybridizes to the sequence of (a), (b), (c) or a complement thereof, under at least low, medium, or high stringency conditions.

[0032] In still other illustrative examples, the methods comprise measuring the level or functional activity of individual expression products of at least 1, 2, 3, 4, 5, 6, 7, 8, 9 or 10 stress marker genes that have a medium correlation with the presence or risk of a physiological response to stress (hereafter referred to as “level three correlation stress marker genes”), representative examples of which include, but are not limited to, (a) a polynucleotide comprising a nucleotide sequence that shares at least 50% (and at least 51% to at least 99% and all integer percentages in between) sequence identity with the sequence set forth in any one of SEQ ID NO: 5, 30, 37, 48, 54, 55, 64, 66, 70, 77, 79, 85, 91, 92, 95, 96, 101, 115, 117, 118, 121, 150, 153, 158, 164, 170, 180, 186 or 198, or a complement thereof; (b) a polynucleotide comprising a nucleotide sequence that encodes a polypeptide comprising the amino acid sequence set forth in any one of SEQ ID NO: 6, 31, 49, 65, 67, 78, 80, 86, 102, 116, 122, 154, 159, 181 or 199; (c) a polynucleotide comprising a nucleotide sequence that encodes a polypeptide that shares at least 50% (and at least 51% to at least 99% and all integer percentages in between) sequence similarity with at least a portion of the sequence set forth in SEQ ID NO: 6, 31, 49, 65, 67, 78, 80, 86, 102, 116, 122, 154, 159, 181 or 199, wherein the portion comprises at least 15 contiguous amino acid residues of that sequence; and (d) a polynucleotide comprising a nucleotide sequence that hybridizes to the sequence of (a), (b), (c) or a complement thereof, under at least low, medium, or high stringency conditions.

[0033] In still other illustrative examples, the methods comprise measuring the level or functional activity of individual expression products of at least 1, 2, 3, 4, 5, 6, 7, 8, 9 or 10 stress marker genes that have a moderate correlation with the presence or risk of a physiological response to stress (hereafter referred to as “level four correlation stress marker genes”), representative examples of which include, but are not limited to, (a) a polynucleotide comprising a nucleotide sequence that shares at least 50% (and at least 51% to at least 99% and all integer percentages in between) sequence identity with the sequence set forth in any one of SEQ ID NO: 7, 15, 16, 19, 21, 24, 25, 26, 28, 35, 38, 39, 42, 46, 57, 68, 73, 81, 83, 97, 99, 107, 113, 123, 160, 165, 175, 187, 188, 194, 195 or 200, or a complement thereof; (b) a polynucleotide comprising a nucleotide sequence that encodes a polypeptide comprising the amino acid sequence set forth in any one of SEQ ID NO: 20, 22, 27, 29, 36, 42, 43, 58, 69, 74, 82, 84, 98, 100, 108, 114, 124, 166, 189 or 201; (c) a polynucleotide comprising a nucleotide sequence that encodes a polypeptide that shares at least 50% (and at least 51% to at least 99% and all integer percentages in between) sequence similarity with at least a portion of the sequence set forth in SEQ ID NO: 20, 22, 27, 29, 36, 42, 43, 58, 69, 74, 82, 84, 98, 100, 108, 114, 124, 166, 189 or 201, wherein the portion comprises at least 15 contiguous amino acid residues of that sequence; and (d) a polynucleotide comprising a nucleotide sequence that hybridizes to the sequence of (a), (b), (c) or a complement thereof, under at least low, medium, or high stringency conditions.

[0034] In still other illustrative examples, the methods comprise measuring the level or functional activity of individual expression products of at least 1, 2, 3, 4, 5, 6, 7, 8, 9 or 10 stress marker genes that have a lower correlation with the presence or risk of a physiological response to stress (hereafter referred to as “level five correlation stress marker genes”), representative examples of which include, but are not limited to, (a) a polynucleotide comprising a nucleotide sequence that shares at least 50% (and at least 51% to at least 99% and all integer percentages in between) sequence identity with the sequence set forth in any one of SEQ ID NO: 1, 3, 9, 11, 13, 32, 33, 34, 40, 41, 50, 51, 56, 59, 62, 63, 71, 75, 87, 93, 105, 111, 119, 127, 129, 130, 131, 137, 139, 141, 143, 145, 156, 161, 167, 169, 171, 173, 176, 185, 204 or 210, or a complement thereof; (b) a polynucleotide comprising a nucleotide sequence that encodes a polypeptide comprising the amino acid sequence set forth in any one of SEQ ID NO: 2, 4, 12, 14, 60, 61, 72, 76, 88, 94, 106, 112, 120, 128, 132, 138, 140, 142, 146, 157, 162, 168, 172, 174, 177, 205 or 211; (c) a polynucleotide comprising a nucleotide sequence that encodes a polypeptide that shares at least 50% (and at least 51% to at least 99% and all integer percentages in between) sequence similarity with at least a portion of the sequence set forth in SEQ ID NO: 2, 4, 12, 14, 60, 61, 72, 76, 88, 94, 106, 112, 120, 128, 132, 138, 140, 142, 146, 157, 162, 168, 172, 174, 177, 205 or 211, wherein the portion comprises at least 15 contiguous amino acid residues of that sequence; and (d) a polynucleotide comprising a nucleotide sequence that hybridizes to the sequence of (a), (b), (c) or a complement thereof, under at least low, medium, or high stringency conditions.

[0035] In some embodiments, the methods comprise measuring the level or functional activity of an expression product of at least 1 level one correlation stress marker gene. In other embodiments, the methods comprise measuring the level or functional activity of an expression product of at least 2 level one correlation stress marker genes. In still other embodiments, the methods comprise measuring the level or functional activity of an expression product of at least 1 level one correlation stress marker gene and the level or functional activity of an expression product of at least 1 level two stress marker gene. In still other embodiments, the methods comprise measuring the level or functional activity of an expression product of at least 2 level one correlation stress marker genes and the level or functional activity of an expression product of at least 1 level two correlation stress marker gene. In still other embodiments, the methods comprise measuring the level or functional activity of an expression product of at least 1 level one correlation stress marker gene and the level or functional activity of an expression product of at least 2 level two correlation stress marker genes.

[0036] In some embodiments, the methods comprise measuring the level or functional activity of an expression product of at least 1 level one correlation stress marker gene and the level or functional activity of an expression product of at least 1 level three correlation stress marker gene. In other embodiments, the methods comprise measuring the level or functional activity of an expression product of at least 2 level one correlation stress marker genes and the level or functional activity of an expression product of at least 1 level three correlation stress marker gene. In still other embodiments, the methods comprise measuring the level or functional activity of an expression product of at least 1 level one correlation stress marker gene and the level or functional activity of an expression product of at least 2 level three correlation stress marker genes. In still other embodiments, the methods comprise measuring the level or functional activity of an expression product of at least 1 level one correlation stress marker gene and the level or functional activity of an expression product of at least 3 level three correlation stress marker genes.

[0037] In some embodiments, the methods comprise measuring the level or functional activity of an expression product of at least 1 level one correlation stress marker gene and the level or functional activity of an expression product of at least 1 level four correlation stress marker gene. In other embodiments, the methods comprise measuring the level or functional activity of an expression product of at least 2 level one correlation stress marker genes and the level or functional activity of an expression product of at least 1 level four correlation stress marker gene. In still other embodiments, the methods comprise measuring the level or functional activity of an expression product of at least 1 level one correlation stress marker gene and the level or functional activity of an expression product of at least 2 level four correlation stress marker gene. In still other embodiments, the methods comprise measuring the level or functional activity of an expression product of at least 1 level one correlation stress marker gene and the level or functional activity of an expression product of at least 3 level four correlation stress marker genes. In still other embodiments, the methods comprise measuring the level or functional activity of an expression product of at least 1 level one correlation stress marker gene and the level or functional activity of an expression product of at least 4 level four correlation stress marker genes.

[0038] In some embodiments, the methods comprise measuring the level or functional activity of an expression product of at least 1 level one correlation stress marker gene and the level or functional activity of an expression product of at least 1 level five correlation stress marker gene. In other embodiments, the methods comprise measuring the level or functional activity of an expression product of at least 2 level one correlation stress marker genes and the level or functional activity of an expression product of at least 1 level five correlation stress marker gene. In still other embodiments, the methods comprise measuring the level or functional activity of an expression product of at least 1 level one correlation stress marker gene and the level or functional activity of an expression product of at least 2 level five correlation stress marker gene. In still other embodiments, the methods comprise measuring the level or functional activity of an expression product of at least 1 level one correlation stress marker gene and the level or functional activity of an expression product of at least 3 level five correlation stress marker genes. In still other embodiments, the methods comprise measuring the level or functional activity of an expression product of at least 1 level one correlation stress marker gene and the level or functional activity of an expression product of at least 4 level five correlation stress marker genes.

[0039] In some embodiments, the methods comprise measuring the level or functional activity of an expression product of at least 1 level two correlation stress marker gene. In other embodiments, the methods comprise measuring the level or functional activity of an expression product of at least 2 level two correlation stress marker genes. In still other embodiments, the methods comprise measuring the level or functional activity of an expression product of at least 1 level two correlation stress marker gene and the level or functional activity of an expression product of at least 1 level three correlation stress marker gene. In other embodiments, the methods comprise measuring the level or functional activity of an expression product of at least 2 level two correlation stress marker genes and the level or functional activity of an expression product of at least 1 level three correlation stress marker gene. In still other embodiments, the methods comprise measuring the level or functional activity of an expression product of at least 1 level two correlation stress marker gene and the level or functional activity of an expression product of at least 2 level three correlation stress marker genes. In still other embodiments, the methods comprise measuring the level or functional activity of an expression product of at least 1 level two correlation stress marker gene and the level or functional activity of an expression product of at least 3 level three correlation stress marker genes. In still other embodiments, the methods comprise measuring the level or functional activity of an expression product of at least 1 level two correlation stress marker gene and the level or functional activity of an expression product of at least 4 level three correlation stress marker genes.

[0040] In some embodiments, the methods comprise measuring the level or functional activity of an expression product of at least 1 level two correlation stress marker gene and the level or functional activity of an expression product of at least 1 level four correlation stress marker gene. In other embodiments, the methods comprise measuring the level or functional activity of an expression product of at least 2 level two correlation stress marker genes and the level or functional activity of an expression product of at least 1 level four correlation stress marker gene. In still other embodiments, the methods comprise measuring the level or functional activity of an expression product of at least 1 level two correlation stress marker gene and the level or functional activity of an expression product of at least 2 level four correlation stress marker genes. In still other embodiments, the methods comprise measuring the level or functional activity of an expression product of at least 1 level two correlation stress marker gene and the level or functional activity of an expression product of at least 3 level four correlation stress marker genes. In still other embodiments, the methods comprise measuring the level or functional activity of an expression product of at least 1 level two correlation stress marker gene and the level or functional activity of an expression product of at least 4 level four correlation stress marker genes. In still other embodiments, the methods comprise measuring the level or functional activity of an expression product of at least 1 level two correlation stress marker gene and the level or functional activity of an expression product of at least 5 level four correlation stress marker genes.

[0041] In some embodiments, the methods comprise measuring the level or functional activity of an expression product of at least 1 level two correlation stress marker gene. In other embodiments, the methods comprise measuring the level or functional activity of an expression product of at least 2 level two correlation stress marker gene. In still other embodiments, the methods comprise measuring the level or functional activity of an expression product of at least 1 level two correlation stress marker gene and the level or functional activity of an expression product of at least 1 level five correlation stress marker gene. In other embodiments, the methods comprise measuring the level or functional activity of an expression product of at least 2 level two correlation stress marker genes and the level or functional activity of an expression product of at least 1 level five correlation stress marker gene. In still other embodiments, the methods comprise measuring the level or functional activity of an expression product of at least 1 level two correlation stress marker gene and the level or functional activity of an expression product of at least 2 level five correlation stress marker genes. In still other embodiments, the methods comprise measuring the level or functional activity of an expression product of at least 1 level two correlation stress marker gene and the level or functional activity of an expression product of at least 3 level five correlation stress marker genes. In still other embodiments, the methods comprise measuring the level or functional activity of an expression product of at least 1 level two correlation stress marker gene and the level or functional activity of an expression product of at least 4 level five correlation stress marker genes. In still other embodiments, the methods comprise measuring the level or functional activity of an expression product of at least 1 level two correlation stress marker gene and the level or functional activity of an expression product of at least 5 level five correlation stress marker genes.

[0042] In some embodiments, the methods comprise measuring the level or functional activity of an expression product of at least 1 level three correlation stress marker gene. In other embodiments, the methods comprise measuring the level or functional activity of an expression product of at least 2 level three correlation stress marker genes. In still other embodiments, the methods comprise measuring the level or functional activity of an expression product of at least 1 level three correlation stress marker gene and the level or functional activity of an expression product of at least 1 level four correlation stress marker gene. In other embodiments, the methods comprise measuring the level or functional activity of an expression product of at least 2 level three correlation stress marker genes and the level or functional activity of an expression product of at least 1 level four correlation stress marker gene. In still other embodiments, the methods comprise measuring the level or functional activity of an expression product of at least 1 level three correlation stress marker gene and the level or functional activity of an expression product of at least 2 level four correlation stress marker genes. In still other embodiments, the methods comprise measuring the level or functional activity of an expression product of at least 1 level three correlation stress marker gene and the level or functional activity of an expression product of at least 3 level four correlation stress marker genes. In still other embodiments, the methods comprise measuring the level or functional activity of an expression product of at least 1 level three correlation stress marker gene and the level or functional activity of an expression product of at least 4 level four correlation stress marker genes. In still other embodiments, the methods comprise measuring the level or functional activity of an expression product of at least 1 level three correlation stress marker gene and the level or functional activity of an expression product of at least 5 level four correlation stress marker genes.

[0043] In some embodiments, the methods comprise measuring the level or functional activity of an expression product of at least 1 level three correlation stress marker gene and the level or functional activity of an expression product of at least 1 level five correlation stress marker gene. In other embodiments, the methods comprise measuring the level or functional activity of an expression product of at least 2 level three correlation stress marker genes and the level or functional activity of an expression product of at least 1 level five correlation stress marker gene. In still other embodiments, the methods comprise measuring the level or functional activity of an expression product of at least 1 level three correlation stress marker gene and the level or functional activity of an expression product of at least 2 level five correlation stress marker genes. In still other embodiments, the methods comprise measuring the level or functional activity of an expression product of at least 1 level three correlation stress marker gene and the level or functional activity of an expression product of at least 3 level five correlation stress marker genes. In still other embodiments, the methods comprise measuring the level or functional activity of an expression product of at least 1 level three correlation stress marker gene and the level or functional activity of an expression product of at least 4 level five correlation stress marker genes. In still other embodiments, the methods comprise measuring the level or functional activity of an expression product of at least 1 level three correlation stress marker gene and the level or functional activity of an expression product of at least 5 level five correlation stress marker genes.

[0044] In some embodiments, the methods comprise measuring the level or functional activity of an expression product of at least 1 level four correlation stress marker gene. In other embodiments, the methods comprise measuring the level or functional activity of an expression product of at least 2 level four correlation stress marker genes. In other embodiments, the methods comprise measuring the level or functional activity of an expression product of at least 3 level four correlation stress marker genes. In still other embodiments, the methods comprise measuring the level or functional activity of an expression product of at least 3 level four correlation stress marker genes. In still other embodiments, the methods comprise measuring the level or functional activity of an expression product of at least 4 level four correlation stress marker genes. In still other embodiments, the methods comprise measuring the level or functional activity of an expression product of at least 5 level four correlation stress marker genes. In still other embodiments, the methods comprise measuring the level or functional activity of an expression product of at least 6 level four correlation stress marker genes.

[0045] In some embodiments, the methods comprise measuring the level or functional activity of an expression product of at least 1 level four correlation stress marker gene and the level or functional activity of an expression product of at least 1 level five correlation stress marker gene. In other embodiments, the methods comprise measuring the level or functional activity of an expression product of at least 2 level four correlation stress marker genes and the level or functional activity of an expression product of at least 1 level five correlation stress marker gene. In still other embodiments, the methods comprise measuring the level or functional activity of an expression product of at least 1 level four correlation stress marker gene and the level or functional activity of an expression product of at least 2 level five correlation stress marker genes. In still other embodiments, the methods comprise measuring the level or functional activity of an expression product of at least 1 level four correlation stress marker gene and the level or functional activity of an expression product of at least 3 level five correlation stress marker genes. In still other embodiments, the methods comprise measuring the level or functional activity of an expression product of at least 1 level four correlation stress marker gene and the level or functional activity of an expression product of at least 4 level five correlation stress marker genes. In still other embodiments, the methods comprise measuring the level or functional activity of an expression product of at least 1 level four correlation stress marker gene and the level or functional activity of an expression product of at least 5 level five correlation stress marker genes. In still other embodiments, the methods comprise measuring the level or functional activity of an expression product of at least 1 level four correlation stress marker gene and the level or functional activity of an expression product of at least 6 level five correlation stress marker genes.

[0046] In some embodiments, the methods comprise measuring the level or functional activity of an expression product of at least 1 level five correlation stress marker gene. In other embodiments, the methods comprise measuring the level or functional activity of an expression product of at least 2 level five correlation stress marker genes. In other embodiments, the methods comprise measuring the level or functional activity of an expression product of at least 3 level five correlation stress marker genes. In still other embodiments, the methods comprise measuring the level or functional activity of an expression product of at least 3 level five correlation stress marker genes. In still other embodiments, the methods comprise measuring the level or functional activity of an expression product of at least 4 level five correlation stress marker genes. In still other embodiments, the methods comprise measuring the level or functional activity of an expression product of at least 5 level five correlation stress marker genes. In still other embodiments, the methods comprise measuring the level or functional activity of an expression product of at least 6 level five correlation stress marker genes.

[0047] Advantageously, the biological sample comprises blood, especially peripheral blood, which typically includes leukocytes. Suitably, the expression product is selected from a RNA molecule or a polypeptide. In some embodiments, the expression product is the same as the corresponding expression product. In other embodiments, the expression product is a variant (e.g., an allelic variant) of the corresponding expression product.

[0048] In certain embodiments, the expression product or corresponding expression product is a target RNA (e.g., mRNA) or a DNA copy of the target RNA whose level is measured using at least one nucleic acid probe that hybridises under at least low stringency conditions to the target RNA or to the DNA copy, wherein the nucleic acid probe comprises at least 15 contiguous nucleotides of a stress marker gene. In these embodiments, the measured level or abundance of the target RNA or its DNA copy is normalised to the level or abundance of a reference RNA or a DNA copy of the reference RNA that is present in the same sample. Suitably, the nucleic acid probe is immobilized on a solid or semi-solid support. In illustrative examples of this type, the nucleic acid probe forms part of a spatial array of nucleic acid probes. In some embodiments, the level of nucleic acid probe that is bound to the target RNA or to the DNA copy is measured by hybridization (e.g., using a nucleic acid array). In other embodiments, the level of nucleic acid probe that is bound to the target RNA or to the DNA copy is measured by nucleic acid amplification (e.g., using a polymerase chain reaction (PCR)). In still other embodiments, the level of nucleic acid probe that is bound to the target RNA or to the DNA copy is measured by nuclease protection assay.

[0049] In other embodiments, the expression product or corresponding expression product is a target polypeptide whose level is measured using at least one antigen-binding molecule that is immuno-interactive with the target polypeptide. In these embodiments, the measured level of the target polypeptide is normalized to the level of a reference polypeptide that is present in the same sample. Suitably, the antigen-binding molecule is immobilized on a solid or semi-solid support. In illustrative examples of this type, the antigen-binding molecule forms part of a spatial array of antigen-binding molecule. In some embodiments, the level of antigen-binding molecule that is bound to the target polypeptide is measured by immunoassay (e.g., using an ELISA).

[0050] In still other embodiments, the expression product or corresponding expression product is a target polypeptide whose level is measured using at least one substrate for the target polypeptide with which it reacts to produce a reaction product. In these embodiments, the measured functional activity of the target polypeptide is normalized to the functional activity of a reference polypeptide that is present in the same sample.

[0051] In some embodiments, a system is used to perform the method, which suitably comprises at least one end station coupled to a base station. The base station is suitably caused (a) to receive subject data from the end station via a communications network, wherein the subject data represents parameter values corresponding to the measured or normalized level or functional activity of at least one expression product in the biological sample, and (b) to compare the subject data with predetermined data representing the measured or normalized level or functional activity of at least one corresponding expression product in the reference sample to thereby determine any difference in the level or functional activity of the expression product in the biological sample as compared to the level or functional activity of the corresponding expression product in the reference sample. Desirably, the base station is further caused to provide a diagnosis for the presence, absence, degree, or risk of development, of a stress response. In these embodiments, the base station may be further caused to transfer an indication of the diagnosis to the end station via the communications network.

[0052] In another aspect, the invention provides methods for determining the presence or degree of immunosuppression in a test subject. These methods generally comprise detecting in the subject aberrant expression of at least one stress marker gene as broadly described above.

[0053] In yet another aspect, the present invention provides methods for treating or preventing the development of stress or a related condition in a test subject. These methods generally comprise detecting aberrant expression of at least one stress marker gene in the subject, and managing the environment of the subject to prevent or minimize exposure of the subject to a causative stressor and/or administering to the subject an effective amount of an agent that treats or ameliorates the symptoms or reverses or inhibits the development of stress in the subject. In certain embodiments, the related condition is immunosuppression.

[0054] Accordingly, in a related aspect, the present invention provides methods for treating or preventing the development of immunosuppression in a test subject. These methods generally comprise detecting aberrant expression of at least one stress marker gene in the subject, and managing the environment of the subject to prevent or minimize exposure of the subject to a causative stressor and/or administering to the subject an effective amount of an agent that treats or ameliorates the symptoms or reverses or inhibits the development of stress in the subject.

[0055] In still another aspect, the present invention provides methods for assessing the capacity of a subject's immune system to produce an immunogenic response to a selected antigen. These methods generally comprise determining whether at least one stress marker gene as broadly described above is normally or aberrantly expressed in the subject, whereby normal expression of the or each stress marker gene is indicative of a normal capacity to produce the immunogenic response and whereby aberrant expression of the or each stress marker gene is indicative of an impaired capacity to produce the immunogenic response.

[0056] In a further aspect, the present invention provides methods for eliciting an immune response to a selected antigen in a test subject via administration of a composition comprising the antigen. These methods generally comprise detecting normal expression of at least one stress marker gene as broadly described above in the subject and administering the composition to the subject.

[0057] In some embodiments, the methods further comprise detecting in the subject aberrant expression of at least one stress marker gene as broadly described above and managing the environment of the subject to prevent or minimize exposure of the subject to a causative stressor and/or administering to the subject an effective amount of an agent that reverses or inhibits the development of stress in the subject, and administering the composition to the subject. In some embodiments, the composition is administered to the subject when the or each stress marker gene is normally expressed in the subject.

[0058] In a related aspect, the invention provides methods for improving an immune response to a selected antigen in a test subject to whom/which has been administered a composition comprising the antigen. These methods generally comprise detecting aberrant expression of at least one stress marker gene as broadly described above in the subject and managing the environment of the subject to prevent or minimize exposure of the subject to a causative stressor and/or administering to the subject an effective amount of an agent that reverses or inhibits the development of stress in the subject, whereby the management or administration leads to normal expression of the or each stress marker gene in the subject.

[0059] In another aspect, the present invention provides isolated polynucleotides, referred to herein as “stress marker polynucleotides,” which are generally selected from: (a) a polynucleotide comprising a nucleotide sequence that shares at least 50% (and at least 51% to at least 99% and all integer percentages in between) sequence identity with the sequence set forth in any one of SEQ ID NO: 15, 16, 23, 24, 25, 28, 29, 32, 33, 34, 37, 38, 39, 40, 41, 50, 51, 54, 55, 62, 63, 89, 90, 91, 92, 95, 96, 107, 108, 117, 118, 125, 126, 129, 130, 143, 144, 147, 150, 155, 163, 164, 169, 170, 175, 184, 185, 186, 187, 194, 195, 232, 233, 238, 239, 240, 241, 242 or 243, or a complement thereof; (b) a polynucleotide comprising a portion of the sequence set forth in any one of SEQ ID NO: 15, 16, 23, 24, 25, 28, 29, 32, 33, 34, 37, 38, 39, 40, 41, 50, 51, 54, 55, 62, 63, 89, 90, 91, 92, 95, 96, 107, 108, 117, 118, 125, 126, 129, 130, 143, 144, 147, 150, 155, 163, 164, 169, 170, 175, 184, 185, 186, 187, 194, 195, 232, 233, 238, 239, 240, 241, 242 or 243, or a complement thereof, wherein the portion comprises at least 15 contiguous nucleotides of that sequence or complement; (c) a polynucleotide that hybridizes to the sequence of (a) or (b) or a complement thereof, under at least low, medium or high stringency conditions; and (d) a polynucleotide comprising a portion of any one of SEQ ID NO: 15, 16, 23, 24, 25, 28, 29, 32, 33, 34, 37, 38, 39, 40, 41, 50, 51, 54, 55, 62, 63, 89, 90, 91, 92, 95, 96, 107, 108, 117, 118, 125, 126, 129, 130, 143, 144, 147, 150, 155, 163, 164, 169, 170, 175, 184, 185, 186, 187, 194, 195, 232, 233, 238, 239, 240, 241, 242 or 243, or a complement thereof, wherein the portion comprises at least 15 contiguous nucleotides of that sequence or complement and hybridizes to a sequence of (a), (b) or (c), or a complement thereof, under at least low, medium or high stringency conditions.

[0060] In another aspect, the present invention provides a nucleic acid construct comprising a polynucleotide as broadly described above in operable connection with a regulatory element, which is operable in a host cell. In certain embodiments, the construct is in the form of a vector, especially an expression vector.

[0061] In yet another aspect, the present invention provides isolated host cells containing a nucleic acid construct or vector as broadly described above. In certain advantageous embodiments, the host cells are selected from bacterial cells, yeast cells and insect cells.

[0062] In still another aspect, the present invention provides probes for interrogating nucleic acid for the presence of a polynucleotide as broadly described above. These probes generally comprise a nucleotide sequence that hybridizes under at least low stringency conditions to a polynucleotide as broadly described above. In some embodiments, the probes consist essentially of a nucleic acid sequence which corresponds or is complementary to at least a portion of a nucleotide sequence encoding the amino acid sequence set forth in any one of SEQ ID NO: 2, 6, 8, 10, 12, 14, 18, 20, 22, 27, 31, 36, 43, 45, 47, 49, 53, 58, 60, 61, 65, 67, 69, 72, 74, 76, 78, 80, 82, 84, 86, 88, 94, 98, 100, 102, 104, 106, 110, 112, 114, 116, 120, 122, 124, 128, 132, 134, 136, 138, 140, 142, 146, 149, 152, 154, 157, 159, 162, 166, 168, 172, 174, 177, 179, 181, 183, 189, 191, 193, 197, 199, 201, 203, 205, 207, 209, 211, 213, 215, 217, 219, 221, 223, 225, 227, 229, 231, 235, 237, 245, 247 or 249, wherein the portion is at least 15 nucleotides in length. In other embodiments, the probes comprise a nucleotide sequence which is capable of hybridizing to at least a portion of a nucleotide sequence encoding the amino acid sequence set forth in any one of SEQ ID NO: 2, 6, 8, 10, 12, 14, 18, 20, 22, 27, 31, 36, 43, 45, 47, 49, 53, 58, 60, 61, 65, 67, 69, 72, 74, 76, 78, 80, 82, 84, 86, 88, 94, 98, 100, 102, 104, 106, 110, 112, 114, 116, 120, 122, 124, 128, 132, 134, 136, 138, 140, 142, 146, 149, 152, 154, 157, 159, 162, 166, 168, 172, 174, 177, 179, 181, 183, 189, 191, 193, 197, 199, 201, 203, 205, 207, 209, 211, 213, 215, 217, 219, 221, 223, 225, 227, 229, 231, 235, 237, 245, 247 or 249 under at least low stringency conditions, wherein the portion is at least 15 nucleotides in length. In still other embodiment, the probes comprise a nucleotide sequence that is capable of hybridizing to at least a portion of any one of SEQ ID NO: 1, 3, 4, 5, 7, 9, 11, 13, 15, 16, 17, 19, 21, 23, 24, 25, 26, 28, 29, 30, 32, 33, 34, 35, 37, 38, 39, 40, 41, 42, 44, 46, 48, 50, 51, 52, 54, 55, 56, 57, 59, 62, 63, 64, 66, 68, 70, 71, 73, 75, 77, 79, 81, 83, 85, 87, 89, 90, 91, 92, 93, 95, 96, 97, 99, 101, 103, 105, 107, 108, 109, 111, 113, 115, 117, 118, 119, 121, 123, 125, 126, 127, 129, 130, 131, 133, 135, 137, 139, 141, 143, 144, 145, 147, 148, 150, 151, 153, 155, 156, 158, 160, 161, 163, 164, 165, 167, 169, 170, 171, 173, 175, 176, 178, 180, 182, 184, 185, 186, 187, 188, 190, 192, 194, 195, 196, 198, 200, 202, 204, 206, 208, 210, 212, 214, 216, 218, 220, 222, 224, 226, 228, 230, 232, 233, 234, 236, 238, 239, 240, 241, 242, 243, 244, 246 or 248 under at least low stringency conditions, wherein the portion is at least 15 nucleotides in length. Representative probes for detecting the stress marker polynucleotides according to the resent invention are set forth in SEQ ID NO: 250-1807 (see Table 2).

[0063] In a related aspect, the invention provides a solid or semi-solid support comprising at least one nucleic acid probe as broadly described above immobilized thereon. In some embodiments, the solid or semi-solid support comprises a spatial array of nucleic acid probes immobilized thereon.

[0064] In a further aspect, the present invention provides isolated polypeptides, referred to herein as “stress marker polypeptides,” which are generally selected from: (i) a polypeptide comprising an amino acid sequence that shares at least 50% (and at least 51% to at least 99% and all integer percentages in between) sequence similarity with a polypeptide expression product of a stress marker gene as broadly described above, for example, especially a stress marker gene that comprises a nucleotide sequence that shares at least 50% (and at least 51% to at least 99% and all integer percentages in between) sequence identity with the sequence set forth in any one of SEQ ID NO: 15, 16, 23, 24, 25, 28, 29, 32, 33, 34, 37, 38, 39, 40, 41, 50, 51, 54, 55, 62, 63, 89, 90, 91, 92, 95, 96, 107, 108, 117, 118, 125, 126, 129, 130, 143, 144, 147, 150, 155, 163, 164, 169, 170, 175, 184, 185, 186, 187, 194, 195, 232, 233, 238, 239, 240, 241, 242 or 243; (ii) a portion of the polypeptide according to (i) wherein the portion comprises at least 5 contiguous amino acid residues of that polypeptide; (iii) a polypeptide comprising an amino acid sequence that shares at least 30% similarity (and at least 31% to at least 99% and all integer percentages in between) with at least 15 contiguous amino acid residues of the polypeptide according to (i); and (iv) a polypeptide comprising an amino acid sequence that is immuno-interactive with an antigen-binding molecule that is immuno-interactive with a sequence of (i), (ii) or (iii).

[0065] Still a further aspect of the present invention provides an antigen-binding molecule that is immuno-interactive with a stress marker polypeptide as broadly described above.

[0066] In a related aspect, the invention provides a solid or semi-solid support comprising at least one antigen-binding molecule as broadly described above immobilized thereon. In some embodiments, the solid or semi-solid support comprises a spatial array of antigen-binding molecules immobilized thereon.

[0067] Still another aspect of the invention provides the use of one or more stress marker polynucleotides as broadly described above, or the use of one or more probes as broadly described above, or the use of one or more stress marker polypeptides as broadly described above, or the use of one or more antigen-binding molecules as broadly described above, in the manufacture of a kit for assessing the physiological response to stress or immune function in a subject.

### BRIEF DESCRIPTION OF THE DRAWINGS

[0068] FIG. 1 is a graphical representation of a receiver operating curve (ROC) for comparison of gene expression at 28 days after stressor to Day 0 (Day 0 is following 2 days of road transport). ROC curves are based on cross validated components discriminant function scores.

[0069] FIG. 2 is a graphical representation of a receiver operating curve (ROC) for comparison of gene expression at 28 days after stressor to Day 2 (Day 0 is following 2 days of road transport). ROC curves are based on cross validated components discriminant function scores.

[0070] FIG. 3 is a graphical representation of a receiver operating curve (ROC) for comparison of gene expression at 28 days after stressor to Day 4 (Day 0 is following 2 days of road transport). ROC curves are based on cross validated components discriminant function scores.

[0071] FIG. 4 is a graphical representation of a receiver operating curve (ROC) for comparison of gene expression at 28 days after stressor to Day 7 (Day 0 is following 2 days of road transport). ROC curves are based on cross validated components discriminant function scores.

[0072] FIG. 5 is a graphical representation of a receiver operating curve (ROC) for comparison of gene expression at 28 days after stressor to Day 9 (Day 0 is following 2 days of road transport). ROC curves are based on cross validated components discriminant function scores.

[0073] FIG. 6 is a graphical representation of a receiver operating curve (ROC) for comparison of gene expression at 28 days after stressor to Day 11 (Day 0 is following 2 days of road transport). ROC curves are based on cross validated components discriminant function scores.

[0074] FIG. 7 is a graphical representation of a receiver operating curve (ROC) for comparison of gene expression at 28 days after stressor to Day 14 (Day 0 is following 2 days of road transport). ROC curves are based on cross validated components discriminant function scores.

[0075] FIG. 8 is a graphical representation of a receiver operating curve (ROC) for comparison of gene expression at 28 days after stressor to Day 17 (Day 0 is following 2 days of road transport). ROC curves are based on cross validated components discriminant function scores.

[0076] FIG. 9 is a graphical representation of a receiver operating curve (ROC) for comparison of gene expression at 28 days after stressor to Day 21 (Day 0 is following 2 days of road transport). ROC curves are based on cross validated components discriminant function scores.

[0077] FIG. 10 is a graphical representation of a receiver operating curve (ROC) for comparison of gene expression at 28 days after stressor to Day 24 (Day 0 is following 2 days of road transport). ROC curves are based on cross validated components discriminant function scores.

### DETAILED DESCRIPTION OF THE INVENTION

### 1. Definitions

[0078] Unless defined otherwise, all technical and scientific terms used herein have the same meaning as commonly understood by those of ordinary skill in the art to which the invention belongs. Although any methods and materials similar or equivalent to those described herein can be used in the practice or testing of the present invention, preferred methods and materials are described. For the purposes of the present invention, the following terms are defined below.

[0079] The articles “a” and “an” are used herein to refer to one or to more than one (i.e. to at least one) of the grammatical object of the article. By way of example, “an element” means one element or more than one element.

[0080] The term “aberrant expression,” as used herein to describe the expression of a stress marker gene, refers to the overexpression or underexpression of a stress marker gene relative to the level of expression of the stress marker gene or variant thereof in cells obtained from a healthy subject or from a subject free of stress, and/or to a higher or lower level of a stress marker gene product (e.g., transcript or polypeptide) in a tissue sample or body fluid obtained from a healthy subject or from a subject not under stress. In particular, a stress marker gene is aberrantly expressed if the level of expression of the stress marker gene is higher by at least about 10%, 20%, 30%, 40%, 50%, 60%, 70%, 80% or 90%, or even an at least about 100%, 200%, 300%, 400%, 500%, 600%, 700%, 800%, 900% or 1000%, or lower by at least about 10%, 20%, 30% 40%, 50%, 60%, 70%, 80%, 90%, 92%, 94%, 96%, 97%, 98% or 99%, or even an at least about 99.5%, 99.9%, 99.95%, 99.99%, 99.995% or 99.999% that the level of expression of the stress marker gene by cells obtained from a healthy subject or from a subject not under stress, and/or relative to the level of expression of the stress marker gene in a tissue sample or body fluid obtained from a healthy subject or from a subject not under stress.

[0081] By “about” is meant a quantity, level, value, number, frequency, percentage, dimension, size, amount, weight or length that varies by as much as 30, 25, 20, 25, 10, 9, 8, 7, 6, 5, 4, 3, 2 or 1% to a reference quantity, level, value, number, frequency, percentage, dimension, size, amount, weight or length.

[0082] The term “amplicon” refers to a target sequence for amplification, and/or the amplification products of a target sequence for amplification. In certain other embodiments an “amplicon” may include the sequence of probes or primers used in amplification.

[0083] By “antigen-binding molecule” is meant a molecule that has binding affinity for a target antigen. It will be understood that this term extends to immunoglobulins, immunoglobulin fragments and non-immunoglobulin derived protein frameworks that exhibit antigen-binding activity.

[0084] As used herein, the term “binds specifically,” “specifically immuno-interactive” and the like when referring to an antigen-binding molecule refers to a binding reaction which is determinative of the presence of an antigen in the presence of a heterogeneous population of proteins and other biologics. Thus, under designated immunoassay conditions, the specified antigen-binding molecules bind to a particular antigen and do not bind in a significant amount to other proteins or antigens present in the sample. Specific binding to an antigen under such conditions may require an antigen-binding molecule that is selected for its specificity for a particular antigen. For example, antigen-binding molecules can be raised to a selected protein antigen, which bind to that antigen but not to other proteins present in a sample. A variety of immunoassay formats may be used to select antigen-binding molecules specifically immuno-interactive with a particular protein. For example, solid-phase ELISA immunoassays are routinely used to select monoclonal antibodies specifically immuno-interactive with a protein. See Harlow and Lane (1988) “Antibodies, A Laboratory Manual,” Cold Spring Harbor Publications, New York, for a description of immunoassay formats and conditions that can be used to determine specific immunoreactivity.

[0085] By “biologically active portion” is meant a portion of a full-length parent peptide or polypeptide which portion retains an activity of the parent molecule. As used herein, the term “biologically active portion” includes deletion mutants and peptides, for example of at least about 8, 9, 10, 11, 12, 13, 14, 15, 16, 17, 18, 19, 20, 21, 22, 23, 24, 25, 30, 40, 50, 60, 70, 80, 90, 100, 120, 150, 300, 400, 500, 600, 700, 800, 900, 1000 contiguous amino acids, which comprise an activity of a parent molecule. Portions of this type may be obtained through the application of standard recombinant nucleic acid techniques or synthesized using conventional liquid or solid phase synthesis techniques. For example, reference may be made to solution synthesis or solid phase synthesis as described, for example, in Chapter 9 entitled “Peptide Synthesis” by Atherton and Shephard which is included in a publication entitled “Synthetic Vaccines” edited by Nicholson and published by Blackwell Scientific Publications. Alternatively, peptides can be produced by digestion of a peptide or polypeptide of the invention with proteinases such as endoLys-C, endoArg-C, endoGlu-C and staphylococcus V8-protease. The digested fragments can be purified by, for example, high performance liquid chromatographic (HPLC) techniques. Recombinant nucleic acid techniques can also be used to produce such portions.

[0086] The term “biological sample” as used herein refers to a sample that may be extracted, untreated, treated, diluted or concentrated from an animal. The biological sample may include a biological fluid such as whole blood, serum, plasma, saliva, urine, sweat, ascitic fluid, peritoneal fluid, synovial fluid, amniotic fluid, cerebrospinal fluid, tissue biopsy, and the like. In certain embodiments, the biological sample is blood, especially peripheral blood.

[0087] As used herein, the term “cis-acting sequence”, “cis-acting element” or “cis-regulatory region” or “regulatory region” or similar term shall be taken to mean any sequence of nucleotides, which when positioned appropriately relative to an expressible genetic sequence, is capable of regulating, at least in part, the expression of the genetic sequence. Those skilled in the art will be aware that a cis-regulatory region may be capable of activating, silencing, enhancing, repressing or otherwise altering the level of expression and/or cell-type-specificity and/or developmental specificity of a gene sequence at the transcriptional or post-transcriptional level. In certain embodiments of the present invention, the cis-acting sequence is an activator sequence that enhances or stimulates the expression of an expressible genetic sequence.

[0088] Throughout this specification, unless the context requires otherwise, the words “comprise,” “comprises” and “comprising” will be understood to imply the inclusion of a stated step or element or group of steps or elements but not the exclusion of any other step or element or group of steps or elements.

[0089] By “corresponds to” or “corresponding to” is meant a polynucleotide (a) having a nucleotide sequence that is substantially identical or complementary to all or a portion of a reference polynucleotide sequence or (b) encoding an amino acid sequence identical to an amino acid sequence in a peptide or protein. This phrase also includes within its scope a peptide or polypeptide having an amino acid sequence that is substantially identical to a sequence of amino acids in a reference peptide or protein.

[0090] By “effective amount”, in the context of treating or preventing a condition, is meant the administration of that amount of active to an individual in need of such treatment or prophylaxis, either in a single dose or as part of a series, that is effective for the prevention of incurring a symptom, holding in check such symptoms, and/or treating existing symptoms, of that condition. The effective amount will vary depending upon the health and physical condition of the individual to be treated, the taxonomic group of individual to be treated, the formulation of the composition, the assessment of the medical situation, and other relevant factors. It is expected that the amount will fall in a relatively broad range that can be determined through routine trials.

[0091] The terms “expression” or “gene expression” refer to either production of RNA message or translation of RNA message into proteins or polypeptides. Detection of either types of gene expression in use of any of the methods described herein are part of the invention.

[0092] By “expression vector” is meant any autonomous genetic element capable of directing the transcription of a polynucleotide contained within the vector and suitably the synthesis of a peptide or polypeptide encoded by the polynucleotide. Such expression vectors are known to practitioners in the art.

[0093] The term “gene” as used herein refers to any and all discrete coding regions of the cell's genome, as well as associated non-coding and regulatory regions. The gene is also intended to mean the open reading frame encoding specific polypeptides, introns, and adjacent 5′ and 3′ non-coding nucleotide sequences involved in the regulation of expression. In this regard, the gene may further comprise control signals such as promoters, enhancers, termination and/or polyadenylation signals that are naturally associated with a given gene, or heterologous control signals. The DNA sequences may be cDNA or genomic DNA or a fragment thereof. The gene may be introduced into an appropriate vector for extrachromosomal maintenance or for integration into the host.

[0094] By “high density polynucleotide arrays” and the like is meant those arrays that contain at least 400 different features per cm².

[0095] The phrase “high discrimination hybridization conditions” refers to hybridization conditions in which single base mismatch may be determined.

[0096] “Hybridization” is used herein to denote the pairing of complementary nucleotide sequences to produce a DNA-DNA hybrid or a DNA-RNA hybrid. Complementary base sequences are those sequences that are related by the base-pairing rules. In DNA, A pairs with T and C pairs with G. In RNA U pairs with A and C pairs with G. In this regard, the terms “match” and “mismatch” as used herein refer to the hybridization potential of paired nucleotides in complementary nucleic acid strands. Matched nucleotides hybridize efficiently, such as the classical A-T and G-C base pair mentioned above. Mismatches are other combinations of nucleotides that do not hybridize efficiently.

[0097] The phrase “hybridizing specifically to” and the like refer to the binding, duplexing, or hybridizing of a molecule only to a particular nucleotide sequence under stringent conditions when that sequence is present in a complex mixture (e.g., total cellular) DNA or RNA.

[0098] Reference herein to “immuno-interactive” includes reference to any interaction, reaction, or other form of association between molecules and in particular where one of the molecules is, or mimics, a component of the immune system.

[0099] “Immune function” or “immunoreactivity” refers to the ability of the immune system to respond to foreign antigen as measured by standard assays well known in the art.

[0100] The term “immunosuppression” refers to a decrease in the overall immunoreactivity of the immune system resulting from stress or the physiological response to stress. Suitably, the decrease is by at least 20-40%, or by at least 50-75%, or even by at least 80% relative to the immunoreactivity in the absence of stress. Additionally, the term “immunosuppression” includes within its scope a delay in the occurrence of the immune response as compared to a subject not under stress. A delay in the occurrence of an immune response can be a short delay, for example 1 hr-10 days, i.e., 1 hr, 2, 5 or 10 days. A delay in the occurrence of an immune response can also be a long delay, for example, 10 days-10 years (i.e., 30 days, 60 days, 90 days, 180 days, 1, 2, 5 or 10 years). “Immunosuppression” according to the invention can also mean a decrease in the intensity of an immune response, e.g., a reduced intensity such that it is 5-100%, 25-100% or 75-100% less than the intensity of the immune response of a subject not compromised by stress.

[0101] By “isolated” is meant material that is substantially or essentially free from components that normally accompany it in its native state. For example, an “isolated polynucleotide”, as used herein, refers to a polynucleotide, which has been purified from the sequences which flank it in a naturally-occurring state, e.g., a DNA fragment which has been removed from the sequences that are normally adjacent to the fragment. Alternatively, an “isolated peptide” or an “isolated polypeptide” and the like, as used herein, refer to in vitro isolation and/or purification of a peptide or polypeptide molecule from its natural cellular environment, and from association with other components of the cell, i.e., it is not associated with in vivo substances.

[0102] By “marker gene” is meant a gene that imparts a distinct phenotype to cells expressing the marker gene and thus allows such transformed cells to be distinguished from cells that do not have the marker. A selectable marker gene confers a trait for which one can ‘select’ based on resistance to a selective agent (e.g., a herbicide, antibiotic, radiation, heat, or other treatment damaging to untransformed cells). A screenable marker gene (or reporter gene) confers a trait that one can identify through observation or testing, i.e., by ‘screening’ (e.g. β-glucuronidase, luciferase, or other enzyme activity not present in untransformed cells).

[0103] As used herein, a “naturally-occurring” nucleic acid molecule refers to a RNA or DNA molecule having a nucleotide sequence that occurs in nature. For example a naturally-occurring nucleic acid molecule can encode a protein that occurs in nature.

[0104] By “obtained from” is meant that a sample such as, for example, a cell extract or nucleic acid or polypeptide extract is isolated from, or derived from, a particular source. For instance, the extract may be isolated directly from biological fluid or tissue of the subject.

[0105] The term “oligonucleotide” as used herein refers to a polymer composed of a multiplicity of nucleotide residues (deoxyribonucleotides or ribonucleotides, or related structural variants or synthetic analogues thereof, including nucleotides with modified or substituted sugar groups and the like) linked via phosphodiester bonds (or related structural variants or synthetic analogues thereof). Thus, while the term “oligonucleotide” typically refers to a nucleotide polymer in which the nucleotide residues and linkages between them are naturally-occurring, it will be understood that the term also includes within its scope various analogues including, but not restricted to, peptide nucleic acids (PNAs), phosphorothioate, phosphorodithioate, phosphoroselenoate, phosphorodiselenoate, phosphoroanilothioate, phosphoranilidate, phosphoroamidate, methyl phosphonates, 2-O-methyl ribonucleic acids, and the like. The exact size of the molecule can vary depending on the particular application. Oligonucleotides are a polynucleotide subset with 200 bases or fewer in length. Preferably, oligonucleotides are 10 to 60 bases in length and most preferably 12, 13, 14, 15, 16, 17, 18, 19, or 20 to 40 bases in length. Oligonucleotides are usually single stranded, e.g., for probes; although oligonucleotides may be double stranded, e.g., for use in the construction of a variant nucleic acid sequence. Oligonucleotides of the invention can be either sense or antisense oligonucleotides.

[0106] The term “oligonucleotide array” refers to a substrate having oligonucleotide probes with different known sequences deposited at discrete known locations associated with its surface. For example, the substrate can be in the form of a two dimensional substrate as described in U.S. Pat. No. 5,424,186. Such substrate may be used to synthesize two-dimensional spatially addressed oligonucleotide (matrix) arrays. Alternatively, the substrate may be characterized in that it forms a tubular array in which a two dimensional planar sheet is rolled into a three-dimensional tubular configuration. The substrate may also be in the form of a microsphere or bead connected to the surface of an optic fibre as, for example, disclosed by Chee et al. in WO 00/39587. Oligonucleotide arrays have at least two different features and a density of at least 400 features per cm². In certain embodiments, the arrays can have a density of about 500, at least one thousand, at least 10 thousand, at least 100 thousand, at least one million or at least 10 million features per cm². For example, the substrate may be silicon or glass and can have the thickness of a glass microscope slide or a glass cover slip, or may be composed of other synthetic polymers. Substrates that are transparent to light are useful when the method of performing an assay on the substrate involves optical detection. The term also refers to a probe array and the substrate to which it is attached that form part of a wafer.

[0107] The term “operably connected” or “operably linked” as used herein means placing a structural gene under the regulatory control of a promoter, which then controls the transcription and optionally translation of the gene. In the construction of heterologous promoter/structural gene combinations, it is generally preferred to position the genetic sequence or promoter at a distance from the gene transcription start site that is approximately the same as the distance between that genetic sequence or promoter and the gene it controls in its natural setting; i.e., the gene from which the genetic sequence or promoter is derived. As is known in the art, some variation in this distance can be accommodated without loss of function. Similarly, the preferred positioning of a regulatory sequence element with respect to a heterologous gene to be placed under its control is defined by the positioning of the element in its natural setting; i.e., the genes from which it is derived.

[0108] The term “polynucleotide” or “nucleic acid” as used herein designates mRNA, RNA, cRNA, cDNA or DNA. The term typically refers to polymeric form of nucleotides of at least 10 bases in length, either ribonucleotides or deoxynucleotides or a modified form of either type of nucleotide. The term includes single and double stranded forms of DNA.

[0109] The terms “polynucleotide variant” and “variant” refer to polynucleotides displaying substantial sequence identity with a reference polynucleotide sequence or polynucleotides that hybridize with a reference sequence under stringent conditions that are defined hereinafter. These terms also encompass polynucleotides in which one or more nucleotides have been added or deleted, or replaced with different nucleotides. In this regard, it is well understood in the art that certain alterations inclusive of mutations, additions, deletions and substitutions can be made to a reference polynucleotide whereby the altered polynucleotide retains a biological function or activity of the reference polynucleotide. The terms “polynucleotide variant” and “variant” also include naturally-occurring allelic variants.

[0110] “Polypeptide”, “peptide” and “protein” are used interchangeably herein to refer to a polymer of amino acid residues and to variants and synthetic analogues of the same. Thus, these terms apply to amino acid polymers in which one or more amino acid residues is a synthetic non-naturally-occurring amino acid, such as a chemical analogue of a corresponding naturally-occurring amino acid, as well as to naturally-occurring amino acid polymers.

[0111] The term “polypeptide variant” refers to polypeptides which are distinguished from a reference polypeptide by the addition, deletion or substitution of at least one amino acid residue. In certain embodiments, one or more amino acid residues of a reference polypeptide are replaced by different amino acids. It is well understood in the art that some amino acids may be changed to others with broadly similar properties without changing the nature of the activity of the polypeptide (conservative substitutions) as described hereinafter.

[0112] By “primer” is meant an oligonucleotide which, when paired with a strand of DNA, is capable of initiating the synthesis of a primer extension product in the presence of a suitable polymerizing agent. The primer is preferably single-stranded for maximum efficiency in amplification but can alternatively be double-stranded. A primer must be sufficiently long to prime the synthesis of extension products in the presence of the polymerization agent. The length of the primer depends on many factors, including application, temperature to be employed, template reaction conditions, other reagents, and source of primers. For example, depending on the complexity of the target sequence, the primer may be at least about 5, 6, 7, 8, 9, 10, 11, 12, 13, 14, 15, 16, 17, 18, 19, 20, 21, 22, 23, 24, 25, 26, 27, 28, 29, 30, 35, 40, 50, 75, 100, 150, 200, 300, 400, 500, to one base shorter in length than the template sequence at the 3′ end of the primer to allow extension of a nucleic acid chain, though the 5′ end of the primer may extend in length beyond the 3′ end of the template sequence. In certain embodiments, primers can be large polynucleotides, such as from about 35 nucleotides to several kilobases or more. Primers can be selected to be “substantially complementary” to the sequence on the template to which it is designed to hybridise and serve as a site for the initiation of synthesis. By “substantially complementary”, it is meant that the primer is sufficiently complementary to hybridise with a target polynucleotide. Desirably, the primer contains no mismatches with the template to which it is designed to hybridise but this is not essential. For example, non-complementary nucleotide residues can be attached to the 5′ end of the primer, with the remainder of the primer sequence being complementary to the template. Alternatively, non-complementary nucleotide residues or a stretch of non-complementary nucleotide residues can be interspersed into a primer, provided that the primer sequence has sufficient complementarity with the sequence of the template to hybridise therewith and thereby form a template for synthesis of the extension product of the primer.

[0113] “Probe” refers to a molecule that binds to a specific sequence or sub-sequence or other moiety of another molecule. Unless otherwise indicated, the term “probe” typically refers to a polynucleotide probe that binds to another polynucleotide, often called the “target polynucleotide”, through complementary base pairing. Probes can bind target polynucleotides lacking complete sequence complementarity with the probe, depending on the stringency of the hybridization conditions. Probes can be labeled directly or indirectly and include primers within their scope.

[0114] The term “recombinant polynucleotide” as used herein refers to a polynucleotide formed in vitro by the manipulation of nucleic acid into a form not normally found in nature. For example, the recombinant polynucleotide may be in the form of an expression vector. Generally, such expression vectors include transcriptional and translational regulatory nucleic acid operably linked to the nucleotide sequence.

[0115] By “recombinant polypeptide” is meant a polypeptide made using recombinant techniques, i.e., through the expression of a recombinant or synthetic polynucleotide.

[0116] By “regulatory element” or “regulatory sequence” is meant nucleic acid sequences (e.g., DNA) necessary for expression of an operably linked coding sequence in a particular host cell. The regulatory sequences that are suitable for prokaryotic cells for example, include a promoter, and optionally a cis-acting sequence such as an operator sequence and a ribosome binding site. Control sequences that are suitable for eukaryotic cells include promoters, polyadenylation signals, transcriptional enhancers, translational enhancers, leader or trailing sequences that modulate mRNA stability, as well as targeting sequences that target a product encoded by a transcribed polynucleotide to an intracellular compartment within a cell or to the extracellular environment.

[0117] The term “sequence identity” as used herein refers to the extent that sequences are identical on a nucleotide-by-nucleotide basis or an amino acid-by-amino acid basis over a window of comparison. Thus, a “percentage of sequence identity” is calculated by comparing two optimally aligned sequences over the window of comparison, determining the number of positions at which the identical nucleic acid base (e.g., A, T, C, G, I) or the identical amino acid residue (e.g., Ala, Pro, Ser, Thr, Gly, Val, Leu, Ile, Phe, Tyr, Trp, Lys, Arg, His, Asp, Glu, Asn, Gln, Cys and Met) occurs in both sequences to yield the number of matched positions, dividing the number of matched positions by the total number of positions in the window of comparison (i.e., the window size), and multiplying the result by 100 to yield the percentage of sequence identity. For the purposes of the present invention, “sequence identity” will be understood to mean the “match percentage” calculated by the DNASIS computer program (Version 2.5 for windows; available from Hitachi Software engineering Co., Ltd., South San Francisco, Calif., USA) using standard defaults as used in the reference manual accompanying the software.

[0118] “Similarity” refers to the percentage number of amino acids that are identical or constitute conservative substitutions as defined in Table 3 infra. Similarity may be determined using sequence comparison programs such as GAP (Deveraux et al. 1984, Nucleic Acids Research 12, 387-395). In this way, sequences of a similar or substantially different length to those cited herein might be compared by insertion of gaps into the alignment, such gaps being determined, for example, by the comparison algorithm used by GAP.

[0119] Terms used to describe sequence relationships between two or more polynucleotides or polypeptides include “reference sequence,” “comparison window,” “sequence identity,” “percentage of sequence identity” and “substantial identity”. A “reference sequence” is at least 12 but frequently 15 to 18 and often at least 25 monomer units, inclusive of nucleotides and amino acid residues, in length. Because two polynucleotides may each comprise (1) a sequence (i.e., only a portion of the complete polynucleotide sequence) that is similar between the two polynucleotides, and (2) a sequence that is divergent between the two polynucleotides, sequence comparisons between two (or more) polynucleotides are typically performed by comparing sequences of the two polynucleotides over a “comparison window” to identify and compare local regions of sequence similarity. A “comparison window” refers to a conceptual segment of at least 6 contiguous positions, usually about 50 to about 100, more usually about 100 to about 150 in which a sequence is compared to a reference sequence of the same number of contiguous positions after the two sequences are optimally aligned. The comparison window may comprise additions or deletions (i.e., gaps) of about 20% or less as compared to the reference sequence (which does not comprise additions or deletions) for optimal alignment of the two sequences. Optimal alignment of sequences for aligning a comparison window may be conducted by computerized implementations of algorithms (GAP, BESTFIT, FASTA, and TFASTA in the Wisconsin Genetics Software Package Release 7.0, Genetics Computer Group, 575 Science Drive Madison, Wis., USA) or by inspection and the best alignment (i.e., resulting in the highest percentage homology over the comparison window) generated by any of the various methods selected. Reference also may be made to the BLAST family of programs as for example disclosed by Altschul et al., 1997, Nucl. Acids Res. 25:3389. A detailed discussion of sequence analysis can be found in Unit 19.3 of Ausubel et al., “Current Protocols in Molecular Biology”, John Wiley & Sons Inc, 1994-1998, Chapter 15.

[0120] The terms “subject” or “individual” or “patient”, used interchangeably herein, refer to any subject, particularly a vertebrate subject, and even more particularly a mammalian subject, for whom therapy or prophylaxis is desired. Suitable vertebrate animals that fall within the scope of the invention include, but are not restricted to, primates, avians, livestock animals (e.g., sheep, cows, horses, donkeys, pigs), laboratory test animals (e.g., rabbits, mice, rats, guinea pigs, hamsters), companion animals (e.g., cats, dogs) and captive wild animals (e.g., foxes, deer, dingoes). A preferred subject is an equine animal in need of treatment or prophylaxis for stress. However, it will be understood that the aforementioned terms do not imply that symptoms are present.

[0121] The phrase “substantially similar affinities” refers herein to target sequences having similar strengths of detectable hybridization to their complementary or substantially complementary oligonucleotide probes under a chosen set of stringent conditions.

[0122] The term “template” as used herein refers to a nucleic acid that is used in the creation of a complementary nucleic acid strand to the “template” strand. The template may be either RNA and/or DNA, and the complementary strand may also be RNA and/or DNA. In certain embodiments, the complementary strand may comprise all or part of the complementary sequence to the “template,” and/or may include mutations so that it is not an exact, complementary strand to the “template”. Strands that are not exactly complementary to the template strand may hybridise specifically to the template strand in detection assays described here, as well as other assays known in the art, and such complementary strands that can be used in detection assays are part of the invention.

[0123] The term “transformation” means alteration of the genotype of an organism, for example a bacterium, yeast, mammal, avian, reptile, fish or plant, by the introduction of a foreign or endogenous nucleic acid.

[0124] By “vector” is meant a polynucleotide molecule, suitably a DNA molecule derived, for example, from a plasmid, bacteriophage, yeast, virus, mammal, avian, reptile or fish into which a polynucleotide can be inserted or cloned. A vector preferably contains one or more unique restriction sites and can be capable of autonomous replication in a defined host cell including a target cell or tissue or a progenitor cell or tissue thereof, or be integrable with the genome of the defined host such that the cloned sequence is reproducible. Accordingly, the vector can be an autonomously replicating vector, i.e., a vector that exists as an extrachromosomal entity, the replication of which is independent of chromosomal replication, e.g., a linear or closed circular plasmid, an extrachromosomal element, a minichromosome, or an artificial chromosome. The vector can contain any means for assuring self-replication. Alternatively, the vector can be one which, when introduced into the host cell, is integrated into the genome and replicated together with the chromosome(s) into which it has been integrated. A vector system can comprise a single vector or plasmid, two or more vectors or plasmids, which together contain the total DNA to be introduced into the genome of the host cell, or a transposon. The choice of the vector will typically depend on the compatibility of the vector with the host cell into which the vector is to be introduced. The vector can also include a selection marker such as an antibiotic resistance gene that can be used for selection of suitable transformants. Examples of such resistance genes are known to those of skill in the art.

[0125] The terms “wild-type” and “normal” are used interchangeably to refer to the phenotype that is characteristic of most of the members of the species occurring naturally and contrast for example with the phenotype of a mutant.

### 2. Abbreviations

[0126] The following abbreviations are used throughout the application:
[0127] nt=nucleotide
[0128] nts=nucleotides
[0129] aa=amino acid(s)
[0130] kb=kilobase(s) or kilobase pair(s)
[0131] kDa=kilodalton(s)
[0132] d=day
[0133] h=hour
[0134] s=seconds

### 3. Markers of Stress and Uses Therefor

[0135] The present invention concerns measuring the stress level or physiological response to stress in a subject of interest. Markers of stress, in the form of RNA molecules of specified sequences, or polypeptides expressed from these RNA molecules in cells, especially in blood cells, and more especially in peripheral blood cells, of subjects subjected to stress or perceived to be under stressful conditions, are disclosed. These markers are indicators of stress and, when differentially expressed, are diagnostic for a physiological response to stress in tested subjects. Such markers provide considerable advantages over the prior art in this field. In certain advantageous embodiments where peripheral blood is used for the analysis, it is possible to monitor the reaction to stress, and in addition, the drawing of a blood sample is minimally invasive and relatively inexpensive. The detection methods disclosed herein are thus suitable for widespread screening of subjects.

[0136] It will be apparent that the nucleic acid sequences disclosed herein will find utility in a variety of applications in assessing the response to stress, as well as managing and treating stress. Examples of such applications within the scope of the present disclosure include amplification of stress markers using specific primers, detection of stress markers by hybridisation with oligonucleotide probes, incorporation of isolated nucleic acids into vectors, expression of vector-incorporated nucleic acids as RNA and protein, and development of immunological reagents corresponding to marker encoded products.

[0137] The identified stress markers may in turn be used to design specific oligonucleotide probes and primers. Such probes and primers may be of any length that would specifically hybridize to the identified marker gene sequences and may be at least about 10, 11, 12, 13, 14, 15, 16, 17, 18, 19, 20, 21, 22, 23, 24, 25, 26, 27, 28, 29, 30, 35, 40, 50, 75, 100, 150, 200, 300, 400, 500 nucleotides in length and in the case of probes, up to the full length of the sequences of the marker genes identified herein. Probes may also include additional sequence at their 5′ and/or 3′ ends so that they extent beyond the target sequence with which they hybridize.

[0138] When used in combination with nucleic acid amplification procedures, these probes and primers enable the rapid analysis of biological samples (e.g., peripheral blood samples) for detecting or quantifying marker gene transcripts. Such procedures include any method or technique known in the art or described herein for duplicating or increasing the number of copies or amount of a target nucleic acid or its complement.

[0139] The identified markers may also be used to identify and isolate full-length gene sequences, including regulatory elements for gene expression, from genomic DNA libraries, which are suitably but not exclusively of equine origin. The cDNA sequences identified in the present disclosure may be used as hybridization probes to screen genomic DNA libraries by conventional techniques. Once partial genomic clones have been identified, full-length genes may be isolated by “chromosomal walking” (also called “overlap hybridization”) using, for example, the method disclosed by Chinault & Carbon (1979, Gene 5: 111-126). Once a partial genomic clone has been isolated using a cDNA hybridization probe, non-repetitive segments at or near the ends of the partial genomic clone may be used as hybridization probes in further genomic library screening, ultimately allowing isolation of entire gene sequences for the stress markers of interest. It will be recognized that full-length genes may be obtained using the partial cDNA sequences or short expressed sequence tags (ESTs) described in this disclosure using standard techniques as disclosed for example by Sambrook, et al. (MOLECULAR CLONING. A LABORATORY MANUAL (Cold Spring Harbor Press, 1989) and Ausubel et al., (CURRENT PROTOCOLS IN MOLECULAR BIOLOGY, John Wiley & Sons, Inc. 1994). In addition, the disclosed sequences may be used to identify and isolate full-length cDNA sequences using standard techniques as disclosed, for example, in the above-referenced texts. Sequences identified and isolated by such means may be useful in the detection of the stress marker genes using the detection methods described herein, and are part of the invention.

[0140] One of ordinary skill in the art could select segments from the identified marker genes for use in determining susceptibility, the different detection, diagnostic, or prognostic methods, vector constructs, antigen-binding molecule production, kit, and/or any of the embodiments described herein as part of the present invention. Marker gene sequences that are desirable for use in the invention are those set fort in SEQ ID NO: 1, 3, 4, 5, 7, 9, 11, 13, 15, 16, 17, 19, 21, 23, 24, 25, 26, 28, 29, 30, 32, 33, 34, 35, 37, 38, 39, 40, 41, 42, 44, 46, 48, 50, 51, 52, 54, 55, 56, 57, 59, 62, 63, 64, 66, 68, 70, 71, 73, 75, 77, 79, 81, 83, 85, 87, 89, 90, 91, 92, 93, 95, 96, 97, 99, 101, 103, 105, 107, 108, 109, 111, 113, 115, 117, 118, 119, 121, 123, 125, 126, 127, 129, 130, 131, 133, 135, 137, 139, 141, 143, 144, 145, 147, 148, 150, 151, 153, 155, 156, 158, 160, 161, 163, 164, 165, 167, 169, 170, 171, 173, 175, 176, 178, 180, 182, 184, 185, 186, 187, 188, 190, 192, 194, 195, 196, 198, 200, 202, 204, 206, 208, 210, 212, 214, 216, 218, 220, 222, 224, 226, 228, 230, 232, 233, 234, 236, 238, 239, 240, 241, 242, 243, 244, 246 or 248 (see Table 1).

### 4. Nucleic Acid Molecules of the Invention

[0141] As described in the Examples and in Table 1, the present disclosure provides 134 markers of stress (i.e., 134 stress marker genes), identified by GeneChip™ analysis of blood obtained from normal horses and from horses subjected to stress. Of the 134 marker genes, 96 have full-length or substantially full-length coding sequences and the remaining 38 have partial sequence information at one or both of their 5′ and 3′ ends. The identified stress marker genes include 38 previously uncharacterised equine genes.

[0142] In accordance with the present invention, the sequences of isolated nucleic acids disclosed herein find utility inter alia as hybridization probes or amplification primers. These nucleic acids may be used, for example, in diagnostic evaluation of biological samples or employed to clone full-length cDNAs or genomic clones corresponding thereto. In certain embodiments, these probes and primers represent oligonucleotides, which are of sufficient length to provide specific hybridization to a RNA or DNA sample extracted from the biological sample. The sequences typically will be about 10-20 nucleotides, but may be longer. Longer sequences, e.g., of about 30, 40, 50, 100, 500 and even up to full-length, are desirable for certain embodiments.

[0143] Nucleic acid molecules having contiguous stretches of about 10, 15, 17, 20, 30, 40, 50, 60, 75 or 100 or 500 nucleotides of a sequence set forth in any one of SEQ ID NO: 1, 3, 4, 5, 7, 9, 11, 13, 15, 16, 17, 19, 21, 23, 24, 25, 26, 28, 29, 30, 32, 33, 34, 35, 37, 38, 39, 40, 41, 42, 44, 46, 48, 50, 51, 52, 54, 55, 56, 57, 59, 62, 63, 64, 66, 68, 70, 71, 73, 75, 77, 79, 81, 83, 85, 87, 89, 90, 91, 92, 93, 95, 96, 97, 99, 101, 103, 105, 107, 108, 109, 111, 113, 115, 117, 118, 119, 121, 123, 125, 126, 127, 129, 130, 131, 133, 135, 137, 139, 141, 143, 144, 145, 147, 148, 150, 151, 153, 155, 156, 158, 160, 161, 163, 164, 165, 167, 169, 170, 171, 173, 175, 176, 178, 180, 182, 184, 185, 186, 187, 188, 190, 192, 194, 195, 196, 198, 200, 202, 204, 206, 208, 210, 212, 214, 216, 218, 220, 222, 224, 226, 228, 230, 232, 233, 234, 236, 238, 239, 240, 241, 242, 243, 244, 246 or 248 are contemplated. Molecules that are complementary to the above mentioned sequences and that bind to these sequences under high stringency conditions are also contemplated. These probes are useful in a variety of hybridization embodiments, such as Southern and northern blotting. In some cases, it is contemplated that probes may be used that hybridize to multiple target sequences without compromising their ability to effectively measure a stress response. In general, it is contemplated that the hybridization probes described herein are useful both as reagents in solution hybridization, as in PCR, for detection of expression of corresponding genes, as well as in embodiments employing a solid phase.

[0144] Various probes and primers may be designed around the disclosed nucleotide sequences. For example, in certain embodiments, the sequences used to design probes and primers may include repetitive stretches of adenine nucleotides (poly-A tails) normally attached at the ends of the RNA for the identified marker genes. In other embodiments, probes and primers may be specifically designed to not include these or other segments from the identified marker genes, as one of ordinary skilled in the art may deem certain segments more suitable for use in the detection methods disclosed. In any event, the choice of primer or probe sequences for a selected application is within the realm of the ordinary skilled practitioner. Illustrative probe sequences for detection of stress marker genes are presented in Table 2.

[0145] Primers may be provided in double-stranded or single-stranded form, although the single-stranded form is desirable. Probes, while perhaps capable of priming, are designed to bind to a target DNA or RNA and need not be used in an amplification process. In certain embodiments, the probes or primers are labelled with radioactive species ³²P, ¹⁴C, ³⁵S, ³H, or other label), with a fluorophore (e.g., rhodamine, fluorescein) or with a chemillumiscent label (e.g., luciferase).

[0146] The present invention provides 96 substantially full-length cDNA sequences as well as 59 EST or partial cDNA sequences that are useful as markers of stress. It will be understood, however, that the present disclosure is not limited to these disclosed sequences and is intended particularly to encompass at least isolated nucleic acids that are hybridizable to nucleic acids comprising the disclosed sequences or that are variants of these nucleic acids. For example, a nucleic acid of partial sequence may be used to identify a structurally-related gene or the full-length genomic or cDNA clone from which it is derived. Methods for generating cDNA and genomic libraries which may be used as a target for the above-described probes are known in the art (see, for example, Sambrook et al., 1989, supra and Ausubel et al., 1994, supra). All such nucleic acids as well as the specific nucleic acid molecules disclosed herein are collectively referred to as “stress marker polynucleotides.” Additionally, the present invention includes within its scope isolated or purified expression products of stress marker polynucleotides (i.e., RNA transcripts and polypeptides).

[0147] Accordingly, the present invention encompasses isolated or substantially purified nucleic acid or protein compositions. An “isolated” or “purified” nucleic acid molecule or protein, or biologically active portion thereof, is substantially or essentially free from components that normally accompany or interact with the nucleic acid molecule or protein as found in its naturally occurring environment. Thus, an isolated or purified polynucleotide or polypeptide is substantially free of other cellular material, or culture medium when produced by recombinant techniques, or substantially free of chemical precursors or other chemicals when chemically synthesized. Suitably, an “isolated” polynucleotide is free of sequences (especially protein encoding sequences) that naturally flank the polynucleotide (i.e., sequences located at the 5′ and 3′ ends of the polynucleotide) in the genomic DNA of the organism from which the polynucleotide was derived. For example, in various embodiments, an isolated stress marker polynucleotide can contain less than about 5 kb, 4 kb, 3 kb, 2 kb, 1 kb, 0.5 kb, or 0.1 kb of nucleotide sequences that naturally flank the polynucleotide in genomic DNA of the cell from which the polynucleotide was derived. A polypeptide that is substantially free of cellular material includes preparations of protein having less than about 30%, 20%, 10%, 5%, (by dry weight) of contaminating protein. When the protein of the invention or biologically active portion thereof is recombinantly produced, culture medium suitably represents less than about 30%, 20%, 10%, or 5% (by dry weight) of chemical precursors or non-protein-of-interest chemicals.

[0148] The present invention also encompasses portions of the full-length or substantially full-length nucleotide sequences of the stress marker genes or their transcripts or DNA copies of these transcripts. Portions of a stress marker nucleotide sequence may encode polypeptide portions or segments that retain the biological activity of the native polypeptide. Alternatively, portions of a stress marker nucleotide sequence that are useful as hybridization probes generally do not encode amino acid sequences retaining such biological activity. Thus, portions of a stress marker nucleotide sequence may range from at least about 15, 16, 17, 18, 19, 20, 21, 22, 23, 24, 25, 26, 27, 28, 29, 30, 40, 50, 60, 80, 90, 100 nucleotides, or almost up to the full-length nucleotide sequence encoding the stress marker polypeptides of the invention.

[0149] A portion of a stress marker nucleotide sequence that encodes a biologically active portion of a stress marker polypeptide of the invention may encode at least about 5, 6, 7, 8, 9, 10, 11, 12, 13, 14, 15, 16, 17, 18, 19, 20, 21, 22, 23, 24, 25, 30, 40, 50, 60, 70, 80, 90, 100, 120, 150, 300, 400, 500, 600, 700, 800, 900 or 1000, or even at least about 2000, 3000, 4000 or 5000 contiguous amino acid residues, or almost up to the total number of amino acids present in a full-length stress marker polypeptide. Portions of a stress marker nucleotide sequence that are useful as hybridization probes or PCR primers generally need not encode a biologically active portion of a stress marker polypeptide.

[0150] Thus, a portion of a stress marker nucleotide sequence may encode a biologically active portion of a stress marker polypeptide, or it may be a fragment that can be used as a hybridization probe or PCR primer using standard methods known in the art. A biologically active portion of a stress marker polypeptide can be prepared by isolating a portion of one of the stress marker nucleotide sequences of the invention, expressing the encoded portion of the stress marker polypeptide (e.g., by recombinant expression in vitro), and assessing the activity of the encoded portion of the stress marker polypeptide. Nucleic acid molecules that are portions of a stress marker nucleotide sequence comprise at least about 15, 16, 17, 18, 19, 20, 25, 30, 50, 75, 100, 150, 200, 250, 300, 350, 400, 450, 500, 550, 600, or 650 nucleotides, or almost up to the number of nucleotides present in a full-length stress marker nucleotide sequence.

[0151] The invention also contemplates variants of the stress marker nucleotide sequences. Nucleic acid variants can be naturally-occurring, such as allelic variants (same locus), homologues (different locus), and orthologues (different organism) or can be non naturally-occurring. Naturally occurring variants such as these can be identified with the use of well-known molecular biology techniques, as, for example, with polymerase chain reaction (PCR) and hybridization techniques as known in the art. Non-naturally occurring variants can be made by mutagenesis techniques, including those applied to polynucleotides, cells, or organisms. The variants can contain nucleotide substitutions, deletions, inversions and insertions. Variation can occur in either or both the coding and non-coding regions. The variations can produce both conservative and non-conservative amino acid substitutions (as compared in the encoded product). For nucleotide sequences, conservative variants include those sequences that, because of the degeneracy of the genetic code, encode the amino acid sequence of one of the stress marker polypeptides of the invention. Variant nucleotide sequences also include synthetically derived nucleotide sequences, such as those generated, for example, by using site-directed mutagenesis but which still encode a stress marker polypeptide of the invention. Generally, variants of a particular nucleotide sequence of the invention will have at least about 30%, 40% 50%, 55%, 60%, 65%, 70%, generally at least about 75%, 80%, 85%, desirably about 90% to 95% or more, and more suitably about 98% or more sequence identity to that particular nucleotide sequence as determined by sequence alignment programs described elsewhere herein using default parameters.

[0152] The stress marker nucleotide sequences of the invention can be used to isolate corresponding sequences and alleles from other organisms, particularly other mammals, especially other equine species. Methods are readily available in the art for the hybridization of nucleic acid sequences. Coding sequences from other organisms may be isolated according to well known techniques based on their sequence identity with the coding sequences set forth herein. In these techniques all or part of the known coding sequence is used as a probe which selectively hybridizes to other stress marker coding sequences present in a population of cloned genomic DNA fragments or cDNA fragments (i.e., genomic or cDNA libraries) from a chosen organism. Accordingly, the present invention also contemplates polynucleotides that hybridize to the stress marker gene nucleotide sequences, or to their complements, under stringency conditions described below. As used herein, the term “hybridizes under low stringency, medium stringency, high stringency, or very high stringency conditions” describes conditions for hybridization and washing. Guidance for performing hybridization reactions can be found in Ausubel et al., (1998, supra), Sections 6.3.1-6.3.6. Aqueous and non-aqueous methods are described in that reference and either can be used. Reference herein to low stringency conditions include and encompass from at least about 1% v/v to at least about 15% v/v formamide and from at least about 1 M to at least about 2 M salt for hybridization at 42° C., and at least about 1 M to at least about 2 M salt for washing at 42° C. Low stringency conditions also may include 1% Bovine Serum Albumin (BSA), 1 mM EDTA, 0.5 M NaHPO₄ (pH 7.2), 7% SDS for hybridization at 65° C., and (i) 2×SSC, 0.1% SDS; or (ii) 0.5% BSA, 1 mM EDTA, 40 mM NaHPO₄ (pH 7.2), 5% SDS for washing at room temperature. One embodiment of low stringency conditions includes hybridization in 6× sodium chloride/sodium citrate (SSC) at about 45° C., followed by two washes in 0.2×SSC, 0.1% SDS at least at 50° C. (the temperature of the washes can be increased to 55° C. for low stringency conditions). Medium stringency conditions include and encompass from at least about 16% v/v to at least about 30% v/v formamide and from at least about 0.5 M to at least about 0.9 M salt for hybridization at 42° C., and at least about 0.1 M to at least about 0.2 M salt for washing at 55° C. Medium stringency conditions also may include 1% Bovine Serum Albumin (BSA), 1 mM EDTA, 0.5 M NaHPO₄ (pH 7.2), 7% SDS for hybridization at 65° C., and (i) 2×SSC, 0.1% SDS; or (ii) 0.5% BSA, 1 mM EDTA, 40 mM NaHPO₄ (pH 7.2), 5% SDS for washing at 60-65° C. One embodiment of medium stringency conditions includes hybridizing in 6×SSC at about 45° C., followed by one or more washes in 0.2×SSC, 0.1% SDS at 60° C. High stringency conditions include and encompass from at least about 31% v/v to at least about 50% v/v formamide and from about 0.01 M to about 0.15 M salt for hybridization at 42° C., and about 0.01 M to about 0.02 M salt for washing at 55° C. High stringency conditions also may include 1% BSA, 1 mM EDTA, 0.5 M NaHPO₄ (pH 7.2), 7% SDS for hybridization at 65° C., and (i) 0.2×SSC, 0.1% SDS; or (ii) 0.5% BSA, 1 mM EDTA, 40 mM NaHPO₄ (pH 7.2), 1% SDS for washing at a temperature in excess of 65° C. One embodiment of high stringency conditions includes hybridizing in 6×SSC at about 45° C., followed by one or more washes in 0.2×SSC, 0.1% SDS at 65° C.

[0153] In certain embodiments, a stress marker polynucleotide of the invention hybridises to a disclosed nucleotide sequence under very high stringency conditions. One embodiment of very high stringency conditions includes hybridising in 0.5 M sodium phosphate, 7% SDS at 65° C., followed by one or more washes at 0.2×SSC, 1% SDS at 65° C.

[0154] Other stringency conditions are well known in the art and a skilled person will recognize that various factors can be manipulated to optimize the specificity of the hybridization. Optimization of the stringency of the final washes can serve to ensure a high degree of hybridization. For detailed examples, see Ausubel et al., supra at pages 2.10.1 to 2.10.16 and Sambrook et al. (1989, supra) at sections 1.101 to 1.104.

[0155] While stringent washes are typically carried out at temperatures from about 42° C. to 68° C., one skilled in the art will appreciate that other temperatures may be suitable for stringent conditions. Maximum hybridization rate typically occurs at about 20° C. to 25° C. below the Tₘ for formation of a DNA-DNA hybrid. It is well known in the art that the Tₘ is the melting temperature, or temperature at which two complementary polynucleotide sequences dissociate. Methods for estimating Tₘ are well known in the art (see Ausubel et al., supra at page 2.10.8). In general, the Tₘ of a perfectly matched duplex of DNA may be predicted as an approximation by the formula:

Tₘ=81.5+16.6 (log₁₀ M)+0.41 (% G+C)−0.63 (% formamide)−(600/length)

[0156] wherein: M is the concentration of Na⁺, preferably in the range of 0.01 molar to 0.4 molar; % G+C is the sum of guanosine and cytosine bases as a percentage of the total number of bases, within the range between 30% and 75% G+C; % formamide is the percent formamide concentration by volume; length is the number of base pairs in the DNA duplex. The Tₘ of a duplex DNA decreases by approximately 1° C. with every increase of 1% in the number of randomly mismatched base pairs. Washing is generally carried out at Tₘ−15° C. for high stringency, or Tₘ−30° C. for moderate stringency.

[0157] In one example of a hybridization procedure, a membrane (e.g., a nitrocellulose membrane or a nylon membrane) containing immobilized DNA is hybridized overnight at 42° C. in a hybridization buffer (50% deionised formamide, 5×SSC, 5×Denhardt's solution (0.1% ficoll, 0.1% polyvinylpyrollidone and 0.1% bovine serum albumin), 0.1% SDS and 200 mg/mL denatured salmon sperm DNA) containing labeled probe. The membrane is then subjected to two sequential medium stringency washes (i.e., 2×SSC, 0.1% SDS for 15 min at 45° C., followed by 2×SSC, 0.1% SDS for 15 min at 50° C.), followed by two sequential higher stringency washes (i.e., 0.2×SSC, 0.1% SDS for 12 min at 55° C. followed by 0.2×SSC and 0.1% SDS solution for 12 min at 65-68° C.

### 5. Polypeptides of the Invention

[0158] The present invention also contemplates full-length polypeptides encoded by the stress marker genes of the invention as well as the biologically active portions of those polypeptides, which are referred to collectively herein as “stress marker polypeptides”. Biologically active portions of full-length stress marker polypeptides include portions with immuno-interactive activity of at least about 6, 8, 10, 12, 14, 16, 18, 20, 25, 30, 40, 50, 60 amino acid residues in length. For example, immuno-interactive fragments contemplated by the present invention are at least 6 and desirably at least 8 amino acid residues in length, which can elicit an immune response in an animal for the production of antigen-binding molecules that are immuno-interactive with a stress marker polypeptide of the invention. Such antigen-binding molecules can be used to screen other mammals, especially equine mammals, for structurally and/or functionally related stress marker polypeptides. Typically, portions of a full-length stress marker polypeptide may participate in an interaction, for example, an intramolecular or an inter-molecular interaction. An inter-molecular interaction can be a specific binding interaction or an enzymatic interaction (e.g., the interaction can be transient and a covalent bond is formed or broken). Biologically active portions of a full-length stress marker polypeptide include peptides comprising amino acid sequences sufficiently similar to or derived from the amino acid sequences of a (putative) full-length stress marker polypeptide, for example, the amino acid sequences shown in SEQ ID NO: 2, 6, 8, 10, 12, 14, 18, 20, 22, 27, 31, 36, 43, 45, 47, 49, 53, 58, 60, 61, 65, 67, 69, 72, 74, 76, 78, 80, 82, 84, 86, 88, 94, 98, 100, 102, 104, 106, 110, 112, 114, 116, 120, 122, 124, 128, 132, 134, 136, 138, 140, 142, 146, 149, 152, 154, 157, 159, 162, 166, 168, 172, 174, 177, 179, 181, 183, 189, 191, 193, 197, 199, 201, 203, 205, 207, 209, 211, 213, 215, 217, 219, 221, 223, 225, 227, 229, 231, 235, 237, 245, 247 or 249, which include less amino acids than a full-length stress marker polypeptide, and exhibit at least one activity of that polypeptide. Typically, biologically active portions comprise a domain or motif with at least one activity of a full-length stress marker polypeptide. A biologically active portion of a full-length stress marker polypeptide can be a polypeptide which is, for example, 5, 6, 7, 8, 9, 10, 11, 12, 13, 14, 15, 16, 17, 18, 19, 20, 21, 22, 23, 24, 25, 30, 40, 50, 60, 70, 80, 90, 100, 120, 150, 300, 400, 500, 600, 700, 800, 900 or 1000, or even at least about 2000, 3000, 4000 or 5000, or more amino acid residues in length. Suitably, the portion is a “biologically-active portion” having no less than about 1%, 10%, 25% 50% of the activity of the full-length polypeptide from which it is derived.

[0159] The present invention also contemplates variant stress marker polypeptides. “Variant” polypeptides include proteins derived from the native protein by deletion (so-called truncation) or addition of one or more amino acids to the N-terminal and/or C-terminal end of the native protein; deletion or addition of one or more amino acids at one or more sites in the native protein; or substitution of one or more amino acids at one or more sites in the native protein. Variant proteins encompassed by the present invention are biologically active, that is, they continue to possess the desired biological activity of the native protein. Such variants may result from, for example, genetic polymorphism or from human manipulation. Biologically active variants of a native stress marker protein of the invention will have at least 40%, 50%, 60%, 70%, generally at least 75%, 80%, 85%, preferably about 90% to 95% or more, and more preferably about 98% or more sequence similarity with the amino acid sequence for the native protein as determined by sequence alignment programs described elsewhere herein using default parameters. A biologically active variant of a protein of the invention may differ from that protein generally by as much 1000, 500, 400, 300, 200, 100, 50 or 20 amino acid residues or suitably by as few as 1-15 amino acid residues, as few as 1-10, such as 6-10, as few as 5, as few as 4, 3, 2, or even 1 amino acid residue.

[0160] A stress marker polypeptide of the invention may be altered in various ways including amino acid substitutions, deletions, truncations, and insertions. Methods for such manipulations are generally known in the art. For example, amino acid sequence variants of a stress marker protein can be prepared by mutations in the DNA. Methods for mutagenesis and nucleotide sequence alterations are well known in the art. See, for example, Kunkel (1985, Proc. Natl. Acad. Sci. USA 82:488-492), Kunkel et al. (1987, Methods in Enzymol. 154:367-382), U.S. Pat. No. 4,873,192, Watson, J. D. et al. (“Molecular Biology of the Gene”, Fourth Edition, Benjamin/Cummings, Menlo Park, Calif., 1987) and the references cited therein. Guidance as to appropriate amino acid substitutions that do not affect biological activity of the protein of interest may be found in the model of Dayhoff et al. (1978) Atlas of Protein Sequence and Structure (Natl. Biomed. Res. Found., Washington, D.C.). Methods for screening gene products of combinatorial libraries made by point mutations or truncation, and for screening cDNA libraries for gene products having a selected property are known in the art. Such methods are adaptable for rapid screening of the gene libraries generated by combinatorial mutagenesis of stress marker polypeptides. Recursive ensemble mutagenesis (REM), a technique which enhances the frequency of functional mutants in the libraries, can be used in combination with the screening assays to identify stress marker polypeptide variants (Arkin and Yourvan (1992) Proc. Natl. Acad. Sci. USA 89:7811-7815; Delgrave et al. (1993) Protein Engineering 6:327-331). Conservative substitutions, such as exchanging one amino acid with another having similar properties, may be desirable as discussed in more detail below.

[0161] Variant stress marker polypeptides may contain conservative amino acid substitutions at various locations along their sequence, as compared to the parent stress marker amino acid sequence. A “conservative amino acid substitution” is one in which the amino acid residue is replaced with an amino acid residue having a similar side chain. Families of amino acid residues having similar side chains have been defined in the art, which can be generally sub-classified as follows:

[0162] Acidic: The residue has a negative charge due to loss of H ion at physiological pH and the residue is attracted by aqueous solution so as to seek the surface positions in the conformation of a peptide in which it is contained when the peptide is in aqueous medium at physiological pH. Amino acids having an acidic side chain include glutamic acid and aspartic acid.

[0163] Basic: The residue has a positive charge due to association with H ion at physiological pH or within one or two pH units thereof (e.g., histidine) and the residue is attracted by aqueous solution so as to seek the surface positions in the conformation of a peptide in which it is contained when the peptide is in aqueous medium at physiological pH. Amino acids having a basic side chain include arginine, lysine and histidine.

[0164] Charged: The residues are charged at physiological pH and, therefore, include amino acids having acidic or basic side chains (i.e., glutamic acid, aspartic acid, arginine, lysine and histidine).

[0165] Hydrophobic: The residues are not charged at physiological pH and the residue is repelled by aqueous solution so as to seek the inner positions in the conformation of a peptide in which it is contained when the peptide is in aqueous medium. Amino acids having a hydrophobic side chain include tyrosine, valine, isoleucine, leucine, methionine, phenylalanine and tryptophan.

[0166] Neutral/polar: The residues are not charged at physiological pH, but the residue is not sufficiently repelled by aqueous solutions so that it would seek inner positions in the conformation of a peptide in which it is contained when the peptide is in aqueous medium. Amino acids having a neutral/polar side chain include asparagine, glutamine, cysteine, histidine, serine and threonine.

[0167] This description also characterizes certain amino acids as “small” since their side chains are not sufficiently large, even if polar groups are lacking, to confer hydrophobicity. With the exception of proline, “small” amino acids are those with four carbons or less when at least one polar group is on the side chain and three carbons or less when not. Amino acids having a small side chain include glycine, serine, alanine and threonine. The gene-encoded secondary amino acid proline is a special case due to its known effects on the secondary conformation of peptide chains. The structure of proline differs from all the other naturally-occurring amino acids in that its side chain is bonded to the nitrogen of the α-amino group, as well as the α-carbon. Several amino acid similarity matrices (e.g., PAM120 matrix and PAM250 matrix as disclosed for example by Dayhoff et al. (1978) A model of evolutionary change in proteins. Matrices for determining distance relationships In M. O. Dayhoff, (ed.), Atlas of protein sequence and structure, Vol. 5, pp. 345-358, National Biomedical Research Foundation, Washington D.C.; and by Gonnet et al., 1992, Science 256(5062): 144301445), however, include proline in the same group as glycine, serine, alanine and threonine. Accordingly, for the purposes of the present invention, proline is classified as a “small” amino acid.

[0168] The degree of attraction or repulsion required for classification as polar or nonpolar is arbitrary and, therefore, amino acids specifically contemplated by the invention have been classified as one or the other. Most amino acids not specifically named can be classified on the basis of known behavior.

[0169] Amino acid residues can be further sub-classified as cyclic or noncyclic, and aromatic or nonaromatic, self-explanatory classifications with respect to the side-chain substituent groups of the residues, and as small or large. The residue is considered small if it contains a total of four carbon atoms or less, inclusive of the carboxyl carbon, provided an additional polar substituent is present; three or less if not. Small residues are, of course, always nonaromatic. Dependent on their structural properties, amino acid residues may fall in two or more classes. For the naturally-occurring protein amino acids, sub-classification according to the this scheme is presented in the Table 3.

[0170] Conservative amino acid substitution also includes groupings based on side chains. For example, a group of amino acids having aliphatic side chains is glycine, alanine, valine, leucine, and isoleucine; a group of amino acids having aliphatic-hydroxyl side chains is serine and threonine; a group of amino acids having amide-containing side chains is asparagine and glutamine; a group of amino acids having aromatic side chains is phenylalanine, tyrosine, and tryptophan; a group of amino acids having basic side chains is lysine, arginine, and histidine; and a group of amino acids having sulfur-containing side chains is cysteine and methionine. For example, it is reasonable to expect that replacement of a leucine with an isoleucine or valine, an aspartate with a glutamate, a threonine with a serine, or a similar replacement of an amino acid with a structurally related amino acid will not have a major effect on the properties of the resulting variant polypeptide. Whether an amino acid change results in a functional stress marker polypeptide can readily be determined by assaying its activity. Conservative substitutions are shown in Table 4 under the heading of exemplary substitutions. More preferred substitutions are shown under the heading of preferred substitutions. Amino acid substitutions falling within the scope of the invention, are, in general, accomplished by selecting substitutions that do not differ significantly in their effect on maintaining (a) the structure of the peptide backbone in the area of the substitution, (b) the charge or hydrophobicity of the molecule at the target site, or (c) the bulk of the side chain. After the substitutions are introduced, the variants are screened for biological activity.

[0171] Alternatively, similar amino acids for making conservative substitutions can be grouped into three categories based on the identity of the side chains. The first group includes glutamic acid, aspartic acid, arginine, lysine, histidine, which all have charged side chains; the second group includes glycine, serine, threonine, cysteine, tyrosine, glutamine, asparagine; and the third group includes leucine, isoleucine, valine, alanine, proline, phenylalanine, tryptophan, methionine, as described in Zubay, G., Biochemistry, third edition, Wm. C. Brown Publishers (1993).

[0172] Thus, a predicted non-essential amino acid residue in a stress marker polypeptide is typically replaced with another amino acid residue from the same side chain family. Alternatively, mutations can be introduced randomly along all or part of a stress marker gene coding sequence, such as by saturation mutagenesis, and the resultant mutants can be screened for an activity of the parent polypeptide to identify mutants which retain that activity. Following mutagenesis of the coding sequences, the encoded peptide can be expressed recombinantly and the activity of the peptide can be determined.

[0173] Accordingly, the present invention also contemplates variants of the naturally-occurring stress marker polypeptide sequences or their biologically-active fragments, wherein the variants are distinguished from the naturally-occurring sequence by the addition, deletion, or substitution of one or more amino acid residues. In general, variants will display at least about 30, 40, 50, 55, 60, 65, 70, 75, 80, 85, 90, 91, 92, 93, 94, 95, 96, 97, 98, 99% similarity to a parent stress marker polypeptide sequence as, for example, set forth in any one of SEQ ID NO: 2, 6, 8, 10, 12, 14, 18, 20, 22, 27, 31, 36, 43, 45, 47, 49, 53, 58, 60, 61, 65, 67, 69, 72, 74, 76, 78, 80, 82, 84, 86, 88, 94, 98, 100, 102, 104, 106, 110, 112, 114, 116, 120, 122, 124, 128, 132, 134, 136, 138, 140, 142, 146, 149, 152, 154, 157, 159, 162, 166, 168, 172, 174, 177, 179, 181, 183, 189, 191, 193, 197, 199, 201, 203, 205, 207, 209, 211, 213, 215, 217, 219, 221, 223, 225, 227, 229, 231, 235, 237, 245, 247 or 249. Desirably, variants will have at least 30, 40, 50, 55, 60, 65, 70, 75, 80, 85, 90, 91, 92, 93, 94, 95, 96, 97, 98, 99% sequence identity to a parent stress marker polypeptide sequence as, for example, set forth in any one of SEQ ID NO: 2, 6, 8, 10, 12, 14, 18, 20, 22, 27, 31, 36, 43, 45, 47, 49, 53, 58, 60, 61, 65, 67, 69, 72, 74, 76, 78, 80, 82, 84, 86, 88, 94, 98, 100, 102, 104, 106, 110, 112, 114, 116, 120, 122, 124, 128, 132, 134, 136, 138, 140, 142, 146, 149, 152, 154, 157, 159, 162, 166, 168, 172, 174, 177, 179, 181, 183, 189, 191, 193, 197, 199, 201, 203, 205, 207, 209, 211, 213, 215, 217, 219, 221, 223, 225, 227, 229, 231, 235, 237, 245, 247 or 249. Moreover, sequences differing from the native or parent sequences by the addition, deletion, or substitution of 1, 2, 3, 4, 5, 6, 7, 8, 9, 10, 11, 12, 13, 14, 15, 16, 17, 18, 19, 20, 30, 40, 50, 60, 70, 80, 90, 100, 150, 200, 300, 500 or more amino acids but which retain the properties of the parent stress marker polypeptide are contemplated. stress marker polypeptides also include polypeptides that are encoded by polynucleotides that hybridise under stringency conditions as defined herein, especially high stringency conditions, to the stress marker polynucleotide sequences of the invention, or the non-coding strand thereof, as described above.

[0174] In one embodiment, variant polypeptides differ from a stress marker sequence by at least one but by less than 50, 40, 30, 20, 15, 10, 8, 6, 5, 4, 3 or 2 amino acid residue(s). In another, variant polypeptides differ from the corresponding sequence in any one of SEQ ID NO: 2, 6, 8, 10, 12, 14, 18, 20, 22, 27, 31, 36, 43, 45, 47, 49, 53, 58, 60, 61, 65, 67, 69, 72, 74, 76, 78, 80, 82, 84, 86, 88, 94, 98, 100, 102, 104, 106, 110, 112, 114, 116, 120, 122, 124, 128, 132, 134, 136, 138, 140, 142, 146, 149, 152, 154, 157, 159, 162, 166, 168, 172, 174, 177, 179, 181, 183, 189, 191, 193, 197, 199, 201, 203, 205, 207, 209, 211, 213, 215, 217, 219, 221, 223, 225, 227, 229, 231, 235, 237, 245, 247 or 249 by at least 1% but less than 20%, 15%, 10% or 5% of the residues. (If this comparison requires alignment the sequences should be aligned for maximum similarity. “Looped” out sequences from deletions or insertions, or mismatches, are considered differences.) The differences are, suitably, differences or changes at a non-essential residue or a conservative substitution.

[0175] A “non-essential” amino acid residue is a residue that can be altered from the wild-type sequence of an embodiment polypeptide without abolishing or substantially altering one or more of its activities. Suitably, the alteration does not substantially alter one of these activities, for example, the activity is at least 20%, 40%, 60%, 70% or 80% of wild-type. An “essential” amino acid residue is a residue that, when altered from the wild-type sequence of a stress marker polypeptide of the invention, results in abolition of an activity of the parent molecule such that less than 20% of the wild-type activity is present.

[0176] In other embodiments, a variant polypeptide includes an amino acid sequence having at least about 50%, 55%, 60%, 65%, 70%, 75%, 80%, 85%, 90%, 91%, 92%, 93%, 94% 95%, 96%, 97%, 98% or more similarity to a corresponding sequence of a stress marker polypeptide as, for example, set forth in any one of SEQ ID NO: 2, 6, 8, 10, 12, 14, 18, 20, 22, 27, 31, 36, 43, 45, 47, 49, 53, 58, 60, 61, 65, 67, 69, 72, 74, 76, 78, 80, 82, 84, 86, 88, 94, 98, 100, 102, 104, 106, 110, 112, 114, 116, 120, 122, 124, 128, 132, 134, 136, 138, 140, 142, 146, 149, 152, 154, 157, 159, 162, 166, 168, 172, 174, 177, 179, 181, 183, 189, 191, 193, 197, 199, 201, 203, 205, 207, 209, 211, 213, 215, 217, 219, 221, 223, 225, 227, 229, 231, 235, 237, 245, 247 or 249, and has the activity of that stress marker polypeptide.

[0177] Stress marker polypeptides of the invention may be prepared by any suitable procedure known to those of skill in the art. For example, the polypeptides may be prepared by a procedure including the steps of: (a) preparing a chimeric construct comprising a nucleotide sequence that encodes at least a portion of a stress marker polynucleotide and that is operably linked to a regulatory element; (b) introducing the chimeric construct into a host cell; (c) culturing the host cell to express the stress marker polypeptide; and (d) isolating the stress marker polypeptide from the host cell. In illustrative examples, the nucleotide sequence encodes at least a portion of the sequence set forth in any one of SEQ ID NO: 2, 6, 8, 10, 12, 14, 18, 20, 22, 27, 31, 36, 43, 45, 47, 49, 53, 58, 60, 61, 65, 67, 69, 72, 74, 76, 78, 80, 82, 84, 86, 88, 94, 98, 100, 102, 104, 106, 110, 112, 114, 116, 120, 122, 124, 128, 132, 134, 136, 138, 140, 142, 146, 149, 152, 154, 157, 159, 162, 166, 168, 172, 174, 177, 179, 181, 183, 189, 191, 193, 197, 199, 201, 203, 205, 207, 209, 211, 213, 215, 217, 219, 221, 223, 225, 227, 229, 231, 235, 237, 245, 247 or 249, or a variant thereof.

[0178] The chimeric construct is typically in the form of an expression vector, which is suitably selected from self-replicating extra-chromosomal vectors (e.g., plasmids) and vectors that integrate into a host genome.

[0179] The regulatory element will generally be appropriate for the host cell employed for expression of the stress marker polynucleotide. Numerous types of expression vectors and regulatory elements are known in the art for a variety of host cells. Illustrative elements of this type include, but are not restricted to, promoter sequences (e.g., constitutive or inducible promoters which may be naturally occurring or combine elements of more than one promoter), leader or signal sequences, ribosomal binding sites, transcriptional start and stop sequences, translational start and termination sequences, and enhancer or activator sequences.

[0180] In some embodiments, the expression vector comprises a selectable marker gene to permit the selection of transformed host cells. Selectable marker genes are well known in the art and will vary with the host cell employed.

[0181] The expression vector may also include a fusion partner (typically provided by the expression vector) so that the stress marker polypeptide is produced as a fusion polypeptide with the fusion partner. The main advantage of fusion partners is that they assist identification and/or purification of the fusion polypeptide. In order to produce the fusion polypeptide, it is necessary to ligate the stress marker polynucleotide into an expression vector so that the translational reading frames of the fusion partner and the stress marker polynucleotide coincide. Well known examples of fusion partners include, but are not limited to, glutathione-S-transferase (GST), Fc portion of human IgG, maltose binding protein (MBP) and hexahistidine (HIS₆), which are particularly useful for isolation of the fusion polypeptide by affinity chromatography. In some embodiments, fusion polypeptides are purified by affinity chromatography using matrices to which the fusion partners bind such as but not limited to glutathione-, amylose-, and nickel- or cobalt-conjugated resins. Many such matrices are available in “kit” form, such as the QIAexpress™ system (Qiagen) useful with (HIS₆) fusion partners and the Pharmacia GST purification system. Other fusion partners known in the art are light-emitting proteins such as green fluorescent protein (GFP) and luciferase, which serve as fluorescent “tags” that permit the identification and/or isolation of fusion polypeptides by fluorescence microscopy or by flow cytometry. Flow cytometric methods such as fluorescence activated cell sorting (FACS) are particularly useful in this latter application.

[0182] Desirably, the fusion partners also possess protease cleavage sites, such as for Factor Xₐ or Thrombin, which permit the relevant protease to partially digest the fusion polypeptide and thereby liberate the stress marker polypeptide from the fusion construct. The liberated polypeptide can then be isolated from the fusion partner by subsequent chromatographic separation.

[0183] Fusion partners also include within their scope “epitope tags,” which are usually short peptide sequences for which a specific antibody is available. Well known examples of epitope tags for which specific monoclonal antibodies are readily available include c-Myc, influenza virus, hemagglutinin and FLAG tags.

[0184] The chimeric constructs of the invention are introduced into a host by any suitable means including “transduction” and “transfection,” which are art recognized as meaning the introduction of a nucleic acid, for example, an expression vector, into a recipient cell by nucleic acid-mediated gene transfer. “Transformation,” however, refers to a process in which a host's genotype is changed as a result of the cellular uptake of exogenous DNA or RNA, and, for example, the transformed cell comprises the expression system of the invention. There are many methods for introducing chimeric constructs into cells. Typically, the method employed will depend on the choice of host cell. Technology for introduction of chimeric constructs into host cells is well known to those of skill in the art. Four general classes of methods for delivering nucleic acid molecules into cells have been described: (1) chemical methods such as calcium phosphate precipitation, polyethylene glycol (PEG)-mediate precipitation and lipofection; (2) physical methods such as microinjection, electroporation, acceleration methods and vacuum infiltration; (3) vector based methods such as bacterial and viral vector-mediated transformation; and (4) receptor-mediated. Transformation techniques that fall within these and other classes are well known to workers in the art, and new techniques are continually becoming known. The particular choice of a transformation technology will be determined by its efficiency to transform certain host species as well as the experience and preference of the person practising the invention with a particular methodology of choice. It will be apparent to the skilled person that the particular choice of a transformation system to introduce a chimeric construct into cells is not essential to or a limitation of the invention, provided it achieves an acceptable level of nucleic acid transfer.

[0185] Recombinant stress marker polypeptides may be produced by culturing a host cell transformed with a chimeric construct. The conditions appropriate for expression of the stress marker polynucleotide will vary with the choice of expression vector and the host cell and are easily ascertained by one skilled in the art through routine experimentation. Suitable host cells for expression may be prokaryotic or eukaryotic. An illustrative host cell for expression of a polypeptide of the invention is a bacterium. The bacterium used may be Escherichia coli. Alternatively, the host cell may be a yeast cell or an insect cell such as, for example, SF9 cells that may be utilized with a baculovirus expression system.

[0186] Recombinant stress marker polypeptides can be conveniently prepared using standard protocols as described for example in Sambrook, et al., (1989, supra), in particular Sections 16 and 17; Ausubel et al., (1994, supra), in particular Chapters 10 and 16; and Coligan et al., CURRENT PROTOCOLS IN PROTEIN SCIENCE (John Wiley & Sons, Inc. 1995-1997), in particular Chapters 1, 5 and 6. Alternatively, the stress marker polypeptides may be synthesized by chemical synthesis, e.g., using solution synthesis or solid phase synthesis as described, for example, in Chapter 9 of Atherton and Shephard (supra) and in Roberge et al (1995, Science 269: 202).

### 6. Antigen-Binding Molecules

[0187] The invention also provides antigen-binding molecules that are specifically immuno-interactive with a stress marker polypeptide of the invention. In one embodiment, the antigen-binding molecule comprise whole polyclonal antibodies. Such antibodies may be prepared, for example, by injecting a stress marker polypeptide of the invention into a production species, which may include mice or rabbits, to obtain polyclonal antisera. Methods of producing polyclonal antibodies are well known to those skilled in the art. Exemplary protocols which may be used are described for example in Coligan et al., CURRENT PROTOCOLS IN IMMUNOLOGY, (John Wiley & Sons, Inc, 1991), and Ausubel et al., (1994-1998, supra), in particular Section III of Chapter 11.

[0188] In lieu of polyclonal antisera obtained in a production species, monoclonal antibodies may be produced using the standard method as described, for example, by Köhler and Milstein (1975, Nature 256, 495-497), or by more recent modifications thereof as described, for example, in Coligan et al., (1991, supra) by immortalizing spleen or other antibody producing cells derived from a production species which has been inoculated with one or more of the stress marker polypeptides of the invention.

[0189] The invention also contemplates as antigen-binding molecules Fv, Fab, Fab′ and F(ab′)₂ immunoglobulin fragments. Alternatively, the antigen-binding molecule may comprise a synthetic stabilized Fv fragment. Exemplary fragments of this type include single chain Fv fragments (sFv, frequently termed scFv) in which a peptide linker is used to bridge the N terminus or C terminus of a V_{H} domain with the C terminus or N-terminus, respectively, of a V_{L} domain. ScFv lack all constant parts of whole antibodies and are not able to activate complement. ScFvs may be prepared, for example, in accordance with methods outlined in Kreber et al (Kreber et al. 1997, J. Immunol. Methods; 201(1): 35-55). Alternatively, they may be prepared by methods described in U.S. Pat. No. 5,091,513, European Patent No 239,400 or the articles by Winter and Milstein (1991, Nature 349:293) and Pluckthun et al (1996, In Antibody engineering: A practical approach. 203-252). In another embodiment, the synthetic stabilised Fv fragment comprises a disulphide stabilised Fv (dsFv) in which cysteine residues are introduced into the V_{H} and V_{L} domains such that in the fully folded Fv molecule the two residues will form a disulphide bond between them. Suitable methods of producing dsFv are described for example in (Glockscuther et al. Biochem. 29: 1363-1367; Reiter et al. 1994, J. Biol. Chem. 269: 18327-18331; Reiter et al. 1994, Biochem. 33: 5451-5459; Reiter et al. 1994. Cancer Res. 54: 2714-2718; Webber et al. 1995, Mol. Immunol. 32: 249-258).

[0190] Phage display and combinatorial methods for generating anti-stress marker polypeptide antigen-binding molecules are known in the art (as described in, e.g., Ladner et al. U.S. Pat. No. 5,223,409; Kang et al. International Publication No. WO 92/18619; Dower et al. International Publication No. WO 91/17271; Winter et al. International Publication WO 92/20791; Markland et al. International Publication No. WO 92/15679; Breitling et al. International Publication WO 93/01288; McCafferty et al. International Publication No. WO 92/01047; Garrard et al. International Publication No. WO 92/09690; Ladner et al. International Publication No. WO 90/02809; Fuchs et al. (1991) Bio/Technology 9:1370-1372; Hay et al. (1992) Hum Antibod Hybridomas 3:81-85; Huse et al. (1989) Science 246:1275-1281; Griffths et al. (1993) EMBO J 12:725-734; Hawkins et al. (1992) J Mol Biol 226:889-896; Clackson et al. (1991) Nature 352:624-628; Gram et al. (1992) PNAS 89:3576-3580; Garrad et al. (1991) Bio/Technology 9:1373-1377; Hoogenboom et al. (1991) Nuc Acid Res 19:4133-4137; and Barbas et al (1991) PNAS 88:7978-7982). The antigen-binding molecules can be used to screen expression libraries for variant stress marker polypeptides. They can also be used to detect and/or isolate the stress marker polypeptides of the invention. Thus, the invention also contemplates the use of antigen-binding molecules to isolate stress marker polypeptides using, for example, any suitable immunoaffinity based method including, but not limited to, immunochromatography and immunoprecipitation. A suitable method utilises solid phase adsorption in which anti-stress marker polypeptide antigen-binding molecules are attached to a suitable resin, the resin is contacted with a sample suspected of containing a stress marker polypeptide, and the stress marker polypeptide, if any, is subsequently eluted from the resin. Illustrative resins include: Sepharose® (Pharmacia), Poros® resins (Roche Molecular Biochemicals, Indianapolis), Actigel Superflow™ resins (Sterogene Bioseparations Inc., Carlsbad Calif.), and Dynabeads™ (Dynal Inc., Lake Success, N.Y.).

[0191] The antigen-binding molecule can be coupled to a compound, e.g., a label such as a radioactive nucleus, or imaging agent, e.g. a radioactive, enzymatic, or other, e.g., imaging agent, e.g., a NMR contrast agent. Labels which produce detectable radioactive emissions or fluorescence are preferred. An anti-stress marker polypeptide antigen-binding molecule (e.g., monoclonal antibody) can be used to detect stress marker polypeptides (e.g., in a cellular lysate or cell supernatant) in order to evaluate the abundance and pattern of expression of the protein. In certain advantageous application in accordance with the present invention, such antigen-binding molecules can be used to monitor stress marker polypeptides levels in biological samples (including whole cells and fluids) for diagnosing the presence, absence, degree, of stress or risk of development of disease as a consequences of stress. Detection can be facilitated by coupling (i.e., physically linking) the antibody to a detectable substance (i.e., antibody labeling). Examples of detectable substances include various enzymes, prosthetic groups, fluorescent materials, luminescent materials, bioluminescent materials, and radioactive materials. Examples of suitable enzymes include horseradish peroxidase, alkaline phosphatase, β-galactosidase, or acetylcholinesterase; examples of suitable prosthetic group complexes include streptavidin/biotin and avidin/biotin; examples of suitable fluorescent materials include umbelliferone, fluorescein, fluorescein isothiocyanate, rhodamine, dichlorotriazinylamine fluorescein, dansyl chloride or phycoerythrin; an example of a luminescent material includes luminol; examples of bioluminescent materials include luciferase, luciferin, and aequorin, and examples of suitable radioactive material include ¹²⁵I, ¹³¹I, ³⁵S or ³H. The label may be selected from a group including a chromogen, a catalyst, an enzyme, a fluorophore, a chemiluminescent molecule, a lanthanide ion such as Europium (Eu³⁴), a radioisotope and a direct visual label. In the case of a direct visual label, use may be made of a colloidal metallic or non-metallic particle, a dye particle, an enzyme or a substrate, an organic polymer, a latex particle, a liposome, or other vesicle containing a signal producing substance and the like.

[0192] A large number of enzymes useful as labels is disclosed in U.S. Pat. No. 4,366,241, U.S. Pat. No. 4,843,000, and U.S. Pat. No. 4,849,338. Enzyme labels useful in the present invention include alkaline phosphatase, horseradish peroxidase, luciferase, β-galactosidase, glucose oxidase, lysozyme, malate dehydrogenase and the like. The enzyme label may be used alone or in combination with a second enzyme in solution.

### 7. Methods of Detecting Aberrant Stress Marker Gene Expression or Alleles

[0193] The present invention is predicated in part on the discovery that horses subjected to stress have aberrant expression of certain genes or certain alleles of genes, referred to herein as stress marker genes, as compared to horses not subjected to stress. It is proposed that aberrant expression of these genes or their homologues or orthologues will be found in other animals under stress. Accordingly, the present invention features a method for assessing stress or for diagnosing stress or a stress-related condition (stress sequelae) in a subject, which is suitably a mammal, by detecting aberrant expression of a stress marker gene in a biological sample obtained from the subject. According to some embodiments, the related condition is characterized by elevated levels of corticosteroids or their modulators (e.g., corticotropin releasing factor). Illustrative examples of such related conditions include: physical stress such as athletic training and physical trauma; mood disorders such as depression, including major depression, single episode depression, recurrent depression, child abuse induced depression, seasonal affective disorder, postpartum depression, dysthemia, bipolar disorders, and cyclothymia; anxiety disorders including panic, phobias, obsessive-compulsive disorder; post-traumatic stress disorder; and sleep disorders induced by stress; inflammation; pain; chronic fatigue syndrome; stress-induced headache; cancer; human immunodeficiency virus (HIV) infections; neurodegenerative diseases such as Alzheimer's disease, Parkinson's disease and Huntington's disease; gastrointestinal diseases such as ulcers, irritable bowel syndrome, Crohn's disease, spastic colon, diarrhea, and post operative ileus, and colonic hypersensitivity associated by psychopathological disturbances or stress; eating disorders such as anorexia and bulimia nervosa; supranuclear palsy; amyotrophic lateral sclerosis; a decrease in immune function or immunosuppression; hemorrhagic stress; stress-induced psychotic episodes; euthyroid sick syndrome; syndrome of inappropriate antidiarrhetic hormone (ADH); overeating or obesity; infertility; head traumas; spinal cord trauma; ischemic neuronal damage (e.g., cerebral ischemia such as cerebral hippocampal ischemia); excitotoxic neuronal damage; epilepsy; cardiovascular disorders including hypertension, tachycardia and congestive heart failure; stroke; immune dysfunctions including stress-induced immune dysfunctions (e.g., stress induced fevers, porcine stress syndrome, bovine shipping fever, equine paroxysmal fibrillation, and dysfunctions induced by confinement in chickens, sheering stress in sheep or human-animal interaction related stress in dogs); restraint; behavioral (operant) conditioning; muscular spasms; urinary incontinence; senile dementia of the Alzheimer's type; multiinfarct dementia; amyotrophic lateral sclerosis; chemical dependencies and addictions (e.g., dependencies on alcohol, cocaine, heroin, benzodiazepines, or other drugs); drug and alcohol withdrawal symptoms; osteoporosis; psychosocial dwarfism; hypoglycemia; hair loss; abnormal circadian rhythm; and disorders related to abnormal circadian rhythm such as time zone change syndrome, seasonal affective disorder, sleep deprivation, irregular sleep-wake pattern, delayed sleep phase syndrome, advanced sleep phase syndrome, non-24 hour sleep wake disorder, light-induced clock resetting, REM sleep disorder, hypersomnia, parasomnia, narcolepsy, nocturnal enuresis, restless legs syndrome, sleep apnea, dysthymia, and abnormal circadian rhythm associated with chronic administration and withdrawal of antidepressant agents.

[0194] In order to make the assessment or the diagnosis, it will be desirable to qualitatively or quantitatively determine the levels of stress marker gene transcripts, or the presence of levels of particular alleles of a stress marker gene, or the level or functional activity of stress marker polypeptides. In some embodiments, the presence, degree or stage of stress or risk of development of stress sequelae is diagnosed when a stress marker gene product is present at a detectably lower level in the biological sample as compared to the level at which that gene is present in a reference sample obtained from normal subjects or from subjects not under stress. In other embodiments, the presence, degree or stage of stress or risk of development of stress sequelae is diagnosed when a stress marker gene product is present at a detectably higher level in the biological sample as compared to the level at which that gene is present in a reference sample obtained from normal subjects or from subjects free of stress. Generally, such diagnoses are made when the level or functional activity of a stress marker gene product in the biological sample varies from the level or functional activity of a corresponding stress marker gene product in the reference sample by at least 10%, 20%, 30%, 40%, 50%, 60%, 70%, 80%, 90%, 92%, 94%, 96%, 97%, 98% or 99%, or even by at least about 99.5%, 99.9%, 99.95%, 99.99%, 99.995% or 99.999%, or even by at least about 100%, 200%, 300%, 400%, 500%, 600%, 700%, 800%, 900% or 1000%. Illustrative increases or decreases in the expression level of representative stress marker genes are shown in Table 6.

[0195] The corresponding gene product is generally selected from the same gene product that is present in the biological sample, a gene product expressed from a variant gene (e.g., an homologous or orthologous gene) including an allelic variant, or a splice variant or protein product thereof. In some embodiments, the method comprises measuring the level or functional activity of individual expression products of at least about 2, 3, 4, 5, 6, 7, 8, 9, 10, 11, 12, 13, 14, 15, 16, 17, 18, 19, 20, 21, 22, 23, 24, 25, 26, 27, 28, 29 or 30 stress marker genes.

[0196] Generally, the biological sample contains blood, especially peripheral blood, or a fraction or extract thereof. Typically, the biological sample comprises blood cells such as mature, immature and developing leukocytes, including lymphocytes, polymorphonuclear leukocytes, neutrophils, monocytes, reticulocytes, basophils, coelomocytes, hemocytes, eosinophils, megakaryocytes, macrophages, dendritic cells natural killer cells, or fraction of such cells (e.g., a nucleic acid or protein fraction). In specific embodiments, the biological sample comprises leukocytes including peripheral blood mononuclear cells (PBMC).

[0197] 7.1 Nucleic Acid-Based Diagnostics

[0198] Nucleic acid used in polynucleotide-based assays can be isolated from cells contained in the biological sample, according to standard methodologies (Sambrook, et al., 1989, supra; and Ausubel et al., 1994, supra). The nucleic acid is typically fractionated (e.g., poly A⁺ RNA) or whole cell RNA. Where RNA is used as the subject of detection, it may be desired to convert the RNA to a complementary DNA. In some embodiments, the nucleic acid is amplified by a template-dependent nucleic acid amplification technique. A number of template dependent processes are available to amplify the stress marker sequences present in a given template sample. An exemplary nucleic acid amplification technique is the polymerase chain reaction (referred to as PCR) which is described in detail in U.S. Pat. Nos. 4,683,195, 4,683,202 and 4,800,159, Ausubel et al. (supra), and in Innis et al., (“PCR Protocols”, Academic Press, Inc., San Diego Calif., 1990). Briefly, in PCR, two primer sequences are prepared that are complementary to regions on opposite complementary strands of the marker sequence. An excess of deoxynucleoside triphosphates are added to a reaction mixture along with a DNA polymerase, e.g., Taq polymerase. If a cognate stress marker sequence is present in a sample, the primers will bind to the marker and the polymerase will cause the primers to be extended along the marker sequence by adding on nucleotides. By raising and lowering the temperature of the reaction mixture, the extended primers will dissociate from the marker to form reaction products, excess primers will bind to the marker and to the reaction products and the process is repeated. A reverse transcriptase PCR amplification procedure may be performed in order to quantify the amount of mRNA amplified. Methods of reverse transcribing RNA into cDNA are well known and described in Sambrook et al., 1989, supra. Alternative methods for reverse transcription utilize thermostable, RNA-dependent DNA polymerases. These methods are described in WO 90/07641. Polymerase chain reaction methodologies are well known in the art.

[0199] In certain advantageous embodiments, the template-dependent amplification involves the quantification of transcripts in real-time. For example, RNA or DNA may be quantified using the Real-Time PCR technique (Higuchi, 1992, et al., Biotechnology 10: 413-417). By determining the concentration of the amplified products of the target DNA in PCR reactions that have completed the same number of cycles and are in their linear ranges, it is possible to determine the relative concentrations of the specific target sequence in the original DNA mixture. If the DNA mixtures are cDNAs synthesized from RNAs isolated from different tissues or cells, the relative abundance of the specific mRNA from which the target sequence was derived can be determined for the respective tissues or cells. This direct proportionality between the concentration of the PCR products and the relative mRNA abundance is only true in the linear range of the PCR reaction. The final concentration of the target DNA in the plateau portion of the curve is determined by the availability of reagents in the reaction mix and is independent of the original concentration of target DNA.

[0200] Another method for amplification is the ligase chain reaction (“LCR”), disclosed in EPO No. 320 308. In LCR, two complementary probe pairs are prepared, and in the presence of the target sequence, each pair will bind to opposite complementary strands of the target such that they abut. In the presence of a ligase, the two probe pairs will link to form a single unit. By temperature cycling, as in PCR, bound ligated units dissociate from the target and then serve as “target sequences” for ligation of excess probe pairs. U.S. Pat. No. 4,883,750 describes a method similar to LCR for binding probe pairs to a target sequence.

[0201] Qβ Replicase, described in PCT Application No. PCT/US87/00880, may also be used. In this method, a replicative sequence of RNA that has a region complementary to that of a target is added to a sample in the presence of an RNA polymerase. The polymerase will copy the replicative sequence that can then be detected.

[0202] An isothermal amplification method, in which restriction endonucleases and ligases are used to achieve the amplification of target molecules that contain nucleotide 5′α-thio-triphosphates in one strand of a restriction site may also be useful in the amplification of nucleic acids in the present invention, Walker et al., (1992, Proc. Natl. Acad. Sci. U.S.A 89: 392-396).

[0203] Strand Displacement Amplification (SDA) is another method of carrying out isothermal amplification of nucleic acids which involves multiple rounds of strand displacement and synthesis, i.e., nick translation. A similar method, called Repair Chain Reaction (RCR), involves annealing several probes throughout a region targeted for amplification, followed by a repair reaction in which only two of the four bases are present. The other two bases can be added as biotinylated derivatives for easy detection. A similar approach is used in SDA. Target specific sequences can also be detected using a cyclic probe reaction (CPR). In CPR, a probe having 3′ and 5′ sequences of non-specific DNA and a middle sequence of specific RNA is hybridized to DNA that is present in a sample. Upon hybridization, the reaction is treated with RNase H, and the products of the probe identified as distinctive products that are released after digestion. The original template is annealed to another cycling probe and the reaction is repeated.

[0204] Still another amplification method described in GB Application No. 2 202 328, and in PCT Application No. PCT/US89/01025, may be used. In the former application, “modified” primers are used in a PCR-like, template- and enzyme-dependent synthesis. The primers may be modified by labeling with a capture moiety (e.g., biotin) and/or a detector moiety (e.g., enzyme). In the latter application, an excess of labeled probes are added to a sample. In the presence of the target sequence, the probe binds and is cleaved catalytically. After cleavage, the target sequence is released intact to be bound by excess probe. Cleavage of the labeled probe signals the presence of the target sequence.

[0205] Other nucleic acid amplification procedures include transcription-based amplification systems (TAS), including nucleic acid sequence based amplification (NASBA) and 3SR (Kwoh et al., 1989, Proc. Natl. Acad. Sci. U.S.A., 86: 1173; Gingeras et al., PCT Application WO 88/10315). In NASBA, the nucleic acids can be prepared for amplification by standard phenol/chloroform extraction, heat denaturation of a clinical sample, treatment with lysis buffer and minispin columns for isolation of DNA and RNA or guanidinium chloride extraction of RNA. These amplification techniques involve annealing a primer which has target specific sequences. Following polymerization, DNA/RNA hybrids are digested with RNase H while double stranded DNA molecules are heat denatured again. In either case the single stranded DNA is made fully double stranded by addition of second target specific primer, followed by polymerization. The double-stranded DNA molecules are then multiply transcribed by an RNA polymerase such as T7 or SP6. In an isothermal cyclic reaction, the RNAs are reverse transcribed into single stranded DNA, which is then converted to double stranded DNA, and then transcribed once again with an RNA polymerase such as T7 or SP6. The resulting products, whether truncated or complete, indicate target specific sequences.

[0206] Davey et al., EPO No. 329 822 disclose a nucleic acid amplification process involving cyclically synthesizing single-stranded RNA (“ssRNA”), ssDNA, and double-stranded DNA (dsDNA), which may be used in accordance with the present invention. The ssRNA is a template for a first primer oligonucleotide, which is elongated by reverse transcriptase (RNA-dependent DNA polymerase). The RNA is then removed from the resulting DNA:RNA duplex by the action of ribonuclease H(RNase H, an RNase specific for RNA in duplex with either DNA or RNA). The resultant ssDNA is a template for a second primer, which also includes the sequences of an RNA polymerase promoter (exemplified by T7 RNA polymerase) 5′ to its homology to the template. This primer is then extended by DNA polymerase (exemplified by the large “Klenow” fragment of E. coli DNA polymerase I), resulting in a double-stranded DNA (“dsDNA”) molecule, having a sequence identical to that of the original RNA between the primers and having additionally, at one end, a promoter sequence. This promoter sequence can be used by the appropriate RNA polymerase to make many RNA copies of the DNA. These copies can then re-enter the cycle leading to very swift amplification. With proper choice of enzymes, this amplification can be done isothermally without addition of enzymes at each cycle. Because of the cyclical nature of this process, the starting sequence can be chosen to be in the form of either DNA or RNA.

[0207] Miller et al. in PCT Application WO 89/06700 disclose a nucleic acid sequence amplification scheme based on the hybridization of a promoter/primer sequence to a target single-stranded DNA (“ssDNA”) followed by transcription of many RNA copies of the sequence. This scheme is not cyclic, i.e., new templates are not produced from the resultant RNA transcripts. Other amplification methods include “RACE” and “one-sided PCR” (Frohman, M. A., In: “PCR Protocols: A Guide to Methods and Applications”, Academic Press, N.Y., 1990; Ohara et al., 1989, Proc. Natl. Acad. Sci. U.S.A., 86: 5673-567).

[0208] Methods based on ligation of two (or more) oligonucleotides in the presence of nucleic acid having the sequence of the resulting “di-oligonucleotide”, thereby amplifying the di-oligonucleotide, may also be used for amplifying target nucleic acid sequences. Wu et al., (1989, Genomics 4: 560).

[0209] Depending on the format, the stress marker nucleic acid of interest is identified in the sample directly using a template-dependent amplification as described, for example, above, or with a second, known nucleic acid following amplification. Next, the identified product is detected. In certain applications, the detection may be performed by visual means (e.g., ethidium bromide staining of a gel). Alternatively, the detection may involve indirect identification of the product via chemiluminescence, radioactive scintigraphy of radiolabel or fluorescent label or even via a system using electrical or thermal impulse signals (Affymax Technology; Bellus, 1994, J Macromol. Sci. Pure, Appl. Chem., A31(1): 1355-1376).

[0210] In some embodiments, amplification products or “amplicons” are visualized in order to confirm amplification of the stress marker sequences. One typical visualization method involves staining of a gel with ethidium bromide and visualization under UV light. Alternatively, if the amplification products are integrally labeled with radio- or fluorometrically-labeled nucleotides, the amplification products can then be exposed to x-ray film or visualized under the appropriate stimulating spectra, following separation. In some embodiments, visualization is achieved indirectly. Following separation of amplification products, a labeled nucleic acid probe is brought into contact with the amplified stress marker sequence. The probe is suitably conjugated to a chromophore but may be radiolabeled. Alternatively, the probe is conjugated to a binding partner, such as an antigen-binding molecule, or biotin, and the other member of the binding pair carries a detectable moiety or reporter molecule. The techniques involved are well known to those of skill in the art and can be found in many standard texts on molecular protocols (e.g., see Sambrook et al., 1989, supra and Ausubel et al. 1994, supra). For example, chromophore or radiolabel probes or primers identify the target during or following amplification.

[0211] In certain embodiments, target nucleic acids are quantified using blotting techniques, which are well known to those of skill in the art. Southern blotting involves the use of DNA as a target, whereas Northern blotting involves the use of RNA as a target. Each provide different types of information, although cDNA blotting is analogous, in many aspects, to blotting or RNA species. Briefly, a probe is used to target a DNA or RNA species that has been immobilized on a suitable matrix, often a filter of nitrocellulose. The different species should be spatially separated to facilitate analysis. This often is accomplished by gel electrophoresis of nucleic acid species followed by “blotting” on to the filter. Subsequently, the blotted target is incubated with a probe (usually labeled) under conditions that promote denaturation and rehybridisation. Because the probe is designed to base pair with the target, the probe will bind a portion of the target sequence under renaturing conditions. Unbound probe is then removed, and detection is accomplished as described above.

[0212] Following detection/quantification, one may compare the results seen in a given subject with a control reaction or a statistically significant reference group of normal subjects or of subjects free of stress. In this way, it is possible to correlate the amount of a stress marker nucleic acid detected with the progression or severity of the disease.

[0213] Also contemplated are genotyping methods and allelic discrimination methods and technologies such as those described by Kristensen et al. (Biotechniques 30(2): 318-322), including the use of single nucleotide polymorphism analysis, high performance liquid chromatography, TaqMan™, liquid chromatography, and mass spectrometry.

[0214] Also contemplated are biochip-based technologies such as those described by Hacia et al. (1996, Nature Genetics 14: 441-447) and Shoemaker et al. (1996, Nature Genetics 14: 450-456). Briefly, these techniques involve quantitative methods for analyzing large numbers of genes rapidly and accurately. By tagging genes with oligonucleotides or using fixed probe arrays, one can employ biochip technology to segregate target molecules as high density arrays and screen these molecules on the basis of hybridization. See also Pease et al. (1994, Proc. Natl. Acad. Sci. U.S.A. 91: 5022-5026); Fodor et al. (1991, Science 251: 767-773). Briefly, nucleic acid probes to stress marker polynucleotides are made and attached to biochips to be used in screening and diagnostic methods, as outlined herein. The nucleic acid probes attached to the biochip are designed to be substantially complementary to specific expressed stress marker nucleic acids, i.e., the target sequence (either the target sequence of the sample or to other probe sequences, for example in sandwich assays), such that hybridization of the target sequence and the probes of the present invention occurs. This complementarity need not be perfect; there may be any number of base pair mismatches which will interfere with hybridization between the target sequence and the nucleic acid probes of the present invention. However, if the number of mismatches is so great that no hybridization can occur under even the least stringent of hybridization conditions, the sequence is not a complementary target sequence. In certain embodiments, more than one probe per sequence is used, with either overlapping probes or probes to different sections of the target being used. That is, two, three, four or more probes, with three being desirable, are used to build in a redundancy for a particular target. The probes can be overlapping (i.e. have some sequence in common), or separate.

[0215] As will be appreciated by those of ordinary skill in the art, nucleic acids can be attached to or immobilized on a solid support in a wide variety of ways. By “immobilized” and grammatical equivalents herein is meant the association or binding between the nucleic acid probe and the solid support is sufficient to be stable under the conditions of binding, washing, analysis, and removal as outlined below. The binding can be covalent or non-covalent. By “non-covalent binding” and grammatical equivalents herein is meant one or more of either electrostatic, hydrophilic, and hydrophobic interactions. Included in non-covalent binding is the covalent attachment of a molecule, such as, streptavidin to the support and the non-covalent binding of the biotinylated probe to the streptavidin. By “covalent binding” and grammatical equivalents herein is meant that the two moieties, the solid support and the probe, are attached by at least one bond, including sigma bonds, pi bonds and coordination bonds. Covalent bonds can be formed directly between the probe and the solid support or can be formed by a cross linker or by inclusion of a specific reactive group on either the solid support or the probe or both molecules. Immobilization may also involve a combination of covalent and non-covalent interactions.

[0216] In general, the probes are attached to the biochip in a wide variety of ways, as will be appreciated by those in the art. As described herein, the nucleic acids can either be synthesized first, with subsequent attachment to the biochip, or can be directly synthesized on the biochip.

[0217] The biochip comprises a suitable solid or semi-solid substrate or solid support. By “substrate” or “solid support” is meant any material that can be modified to contain discrete individual sites appropriate for the attachment or association of the nucleic acid probes and is amenable to at least one detection method. As will be appreciated by practitioners in the art, the number of possible substrates are very large, and include, but are not limited to, glass and modified or functionalized glass, plastics (including acrylics, polystyrene and copolymers of styrene and other materials, polypropylene, polyethylene, polybutylene, polyurethanes, Teflon™, etc.), polysaccharides, nylon or nitrocellulose, resins, silica or silica-based materials including silicon and modified silicon, carbon, metals, inorganic glasses, plastics, etc. In general, the substrates allow optical detection and do not appreciably fluorescese.

[0218] Generally the substrate is planar, although as will be appreciated by those of skill in the art, other configurations of substrates may be used as well. For example, the probes may be placed on the inside surface of a tube, for flow-through sample analysis to minimize sample volume. Similarly, the substrate may be flexible, such as a flexible foam, including closed cell foams made of particular plastics.

[0219] In certain embodiments, oligonucleotides probes are synthesized on the substrate, as is known in the art. For example, photoactivation techniques utilizing photopolymerisation compounds and techniques can be used. In an illustrative example, the nucleic acids are synthesized in situ, using well known photolithographic techniques, such as those described in WO 95/25116; WO 95/35505; U.S. Pat. Nos. 5,700,637 and 5,445,934; and references cited within; these methods of attachment form the basis of the Affymetrix GeneChip™ technology.

[0220] In an illustrative biochip analysis, oligonucleotide probes on the biochip are exposed to or contacted with a nucleic acid sample suspected of containing one or more stress polynucleotides under conditions favoring specific hybridization. Sample extracts of DNA or RNA, either single or double-stranded, may be prepared from fluid suspensions of biological materials, or by grinding biological materials, or following a cell lysis step which includes, but is not limited to, lysis effected by treatment with SDS (or other detergents), osmotic shock, guanidinium isothiocyanate and lysozyme. Suitable DNA, which may be used in the method of the invention, includes cDNA. Such DNA may be prepared by any one of a number of commonly used protocols as for example described in Ausubel, et al., 1994, supra, and Sambrook, et al., et al., 1989, supra.

[0221] Suitable RNA, which may be used in the method of the invention, includes messenger RNA, complementary RNA transcribed from DNA (cRNA) or genomic or subgenomic RNA. Such RNA may be prepared using standard protocols as for example described in the relevant sections of Ausubel, et al. 1994, supra and Sambrook, et al. 1989, supra).

[0222] cDNA may be fragmented, for example, by sonication or by treatment with restriction endonucleases. Suitably, cDNA is fragmented such that resultant DNA fragments are of a length greater than the length of the immobilized oligonucleotide probe(s) but small enough to allow rapid access thereto under suitable hybridization conditions. Alternatively, fragments of cDNA may be selected and amplified using a suitable nucleotide amplification technique, as described for example above, involving appropriate random or specific primers.

[0223] Usually the target stress marker polynucleotides are detectably labeled so that their hybridization to individual probes can be determined. The target polynucleotides are typically detectably labeled with a reporter molecule illustrative examples of which include chromogens, catalysts, enzymes, fluorochromes, chemiluminescent molecules, bioluminescent molecules, lanthanide ions (e.g., Eu³⁴), a radioisotope and a direct visual label. In the case of a direct visual label, use may be made of a colloidal metallic or non-metallic particle, a dye particle, an enzyme or a substrate, an organic polymer, a latex particle, a liposome, or other vesicle containing a signal producing substance and the like. Illustrative labels of this type include large colloids, for example, metal colloids such as those from gold, selenium, silver, tin and titanium oxide. In some embodiments in which an enzyme is used as a direct visual label, biotinylated bases are incorporated into a target polynucleotide. Hybridization is detected by incubation with streptavidin-reporter molecules.

[0224] Suitable fluorochromes include, but are not limited to, fluorescein isothiocyanate (FITC), tetramethylrhodamine isothiocyanate (TRITC), R-Phycoerythrin (RPE), and Texas Red. Other exemplary fluorochromes include those discussed by Dower et al. (International Publication WO 93/06121). Reference also may be made to the fluorochromes described in U.S. Pat. No. 5,573,909 (Singer et al), U.S. Pat. No. 5,326,692 (Brinkley et al). Alternatively, reference may be made to the fluorochromes described in U.S. Pat. Nos. 5,227,487, 5,274,113, 5,405,975, 5,433,896, 5,442,045, 5,451,663, 5,453,517, 5,459,276, 5,516,864, 5,648,270 and 5,723,218. Commercially available fluorescent labels include, for example, fluorescein phosphoramidites such as Fluoreprime™ (Pharmacia), Fluoredite™ (Millipore) and FAM (Applied Biosystems International)

[0225] Radioactive reporter molecules include, for example, ³²P, which can be detected by an X-ray or phosphoimager techniques.

[0226] The hybrid-forming step can be performed under suitable conditions for hybridizing oligonucleotide probes to test nucleic acid including DNA or RNA. In this regard, reference may be made, for example, to NUCLEIC ACID HYBRIDIZATION, A PRACTICAL APPROACH (Homes and Higgins, eds.) (IRL press, Washington D.C., 1985). In general, whether hybridization takes place is influenced by the length of the oligonucleotide probe and the polynucleotide sequence under test, the pH, the temperature, the concentration of mono- and divalent cations, the proportion of G and C nucleotides in the hybrid-forming region, the viscosity of the medium and the possible presence of denaturants. Such variables also influence the time required for hybridization. The preferred conditions will therefore depend upon the particular application. Such empirical conditions, however, can be routinely determined without undue experimentation.

[0227] In certain advantageous embodiments, high discrimination hybridization conditions are used. For example, reference may be made to Wallace et al. (1979, Nucl. Acids Res. 6: 3543) who describe conditions that differentiate the hybridization of 11 to 17 base long oligonucleotide probes that match perfectly and are completely homologous to a target sequence as compared to similar oligonucleotide probes that contain a single internal base pair mismatch. Reference also may be made to Wood et al. (1985, Proc. Natl. Acid. Sci. USA 82: 1585) who describe conditions for hybridization of 11 to 20 base long oligonucleotides using 3M tetramethyl ammonium chloride wherein the melting point of the hybrid depends only on the length of the oligonucleotide probe, regardless of its GC content. In addition, Drmanac et al. (supra) describe hybridization conditions that allow stringent hybridization of 6-10 nucleotide long oligomers, and similar conditions may be obtained most readily by using nucleotide analogues such as ‘locked nucleic acids (Christensen et al., 2001 Biochem J 354: 4814).

[0228] Generally, a hybridization reaction can be performed in the presence of a hybridization buffer that optionally includes a hybridization optimizing agent, such as an isostabilising agent, a denaturing agent and/or a renaturation accelerant. Examples of isostabilising agents include, but are not restricted to, betaines and lower tetraalkyl ammonium salts. Denaturing agents are compositions that lower the melting temperature of double stranded nucleic acid molecules by interfering with hydrogen bonding between bases in a double stranded nucleic acid or the hydration of nucleic acid molecules. Denaturing agents include, but are not restricted to, formamide, formaldehyde, dimethylsulfoxide, tetraethyl acetate, urea, guanidium isothiocyanate, glycerol and chaotropic salts. Hybridization accelerants include heterogeneous nuclear ribonucleoprotein (hnRP) A1 and cationic detergents such as cetyltrimethylammonium bromide (CTAB) and dodecyl trimethylammonium bromide (DTAB), polylysine, spermine, spermidine, single stranded binding protein (SSB), phage T4 gene 32 protein and a mixture of ammonium acetate and ethanol. Hybridization buffers may include target polynucleotides at a concentration between about 0.005 nM and about 50 nM, preferably between about 0.5 nM and 5 nM, more preferably between about 1 nM and 2 nM.

[0229] A hybridization mixture containing the target stress marker polynucleotides is placed in contact with the array of probes and incubated at a temperature and for a time appropriate to permit hybridization between the target sequences in the target polynucleotides and any complementary probes. Contact can take place in any suitable container, for example, a dish or a cell designed to hold the solid support on which the probes are bound. Generally, incubation will be at temperatures normally used for hybridization of nucleic acids, for example, between about 20° C. and about 75° C., example, about 25° C., about 30° C., about 35° C., about 40° C., about 45° C., about 50° C., about 55° C., about 60° C., or about 65° C. For probes longer than 14 nucleotides, 20° C. to 50° C. is desirable. For shorter probes, lower temperatures are preferred. A sample of target polynucleotides is incubated with the probes for a time sufficient to allow the desired level of hybridization between the target sequences in the target polynucleotides and any complementary probes. For example, the hybridization may be carried out at about 45° C.+/−10° C. in formamide for 1-2 days.

[0230] After the hybrid-forming step, the probes are washed to remove any unbound nucleic acid with a hybridization buffer, which can typically comprise a hybridization optimising agent in the same range of concentrations as for the hybridization step. This washing step leaves only bound target polynucleotides. The probes are then examined to identify which probes have hybridized to a target polynucleotide.

[0231] The hybridization reactions are then detected to determine which of the probes has hybridized to a corresponding target sequence. Depending on the nature of the reporter molecule associated with a target polynucleotide, a signal may be instrumentally detected by irradiating a fluorescent label with light and detecting fluorescence in a fluorimeter; by providing for an enzyme system to produce a dye which could be detected using a spectrophotometer; or detection of a dye particle or a colored colloidal metallic or non metallic particle using a reflectometer; in the case of using a radioactive label or chemiluminescent molecule employing a radiation counter or autoradiography. Accordingly, a detection means may be adapted to detect or scan light associated with the label which light may include fluorescent, luminescent, focussed beam or laser light. In such a case, a charge couple device (CCD) or a photocell can be used to scan for emission of light from a probe:target polynucleotide hybrid from each location in the micro-array and record the data directly in a digital computer. In some cases, electronic detection of the signal may not be necessary. For example, with enzymatically generated colour spots associated with nucleic acid array format, visual examination of the array will allow interpretation of the pattern on the array. In the case of a nucleic acid array, the detection means is suitably interfaced with pattern recognition software to convert the pattern of signals from the array into a plain language genetic profile. In certain embodiments, oligonucleotide probes specific for different stress marker gene products are in the form of a nucleic acid array and detection of a signal generated from a reporter molecule on the array is performed using a ‘chip reader’. A detection system that can be used by a ‘chip reader’ is described for example by Pirrung et al (U.S. Pat. No. 5,143,854). The chip reader will typically also incorporate some signal processing to determine whether the signal at a particular array position or feature is a true positive or maybe a spurious signal. Exemplary chip readers are described for example by Fodor et al (U.S. Pat. No. 5,925,525). Alternatively, when the array is made using a mixture of individually addressable kinds of labeled microbeads, the reaction may be detected using flow cytometry.

[0232] 7.2 Protein-Based Diagnostics

[0233] Consistent with the present invention, the presence of an aberrant concentration of a stress marker protein is indicative of the presence, degree or stage of stress or risk of development of stress sequelae. Stress marker protein levels in biological samples can be assayed using any suitable method known in the art. For example, when a stress marker protein is an enzyme, the protein can be quantified based upon its catalytic activity or based upon the number of molecules of the protein contained in a sample. Antibody-based techniques may be employed, such as, for example, immunohistological and immunohistochemical methods for measuring the level of a protein of interest in a tissue sample. For example, specific recognition is provided by a primary antibody (polyclonal or monoclonal) and a secondary detection system is used to detect presence (or binding) of the primary antibody. Detectable labels can be conjugated to the secondary antibody, such as a fluorescent label, a radiolabel, or an enzyme (e.g., alkaline phosphatase, horseradish peroxidase) which produces a quantifiable, e.g., colored, product. In another suitable method, the primary antibody itself can be detectably labeled. As a result, immunohistological labeling of a tissue section is provided. In some embodiments, a protein extract is produced from a biological sample (e.g., tissue, cells) for analysis. Such an extract (e.g., a detergent extract) can be subjected to western-blot or dot/slot assay of the level of the protein of interest, using routine immunoblotting methods (Jalkanen et al., 1985, J. Cell. Biol. 101: 976-985; Jalkanen et al., 1987, J. Cell. Biol. 105: 3087-3096).

[0234] Other useful antibody-based methods include immunoassays, such as the enzyme-linked immunosorbent assay (ELISA) and the radioimmunoassay (RIA). For example, a protein-specific monoclonal antibody, can be used both as an immunoadsorbent and as an enzyme-labeled probe to detect and quantify a stress marker protein of interest. The amount of such protein present in a sample can be calculated by reference to the amount present in a standard preparation using a linear regression computer algorithm (see Lacobilli et al., 1988, Breast Cancer Research and Treatment 11: 19-30). In other embodiments, two different monoclonal antibodies to the protein of interest can be employed, one as the immunoadsorbent and the other as an enzyme-labeled probe.

[0235] Additionally, recent developments in the field of protein capture arrays permit the simultaneous detection and/or quantification of a large number of proteins. For example, low-density protein arrays on filter membranes, such as the universal protein array system (Ge, 2000 Nucleic Acids Res. 28(2):e3) allow imaging of arrayed antigens using standard ELISA techniques and a scanning charge-coupled device (CCD) detector. Immuno-sensor arrays have also been developed that enable the simultaneous detection of clinical analytes. It is now possible using protein arrays, to profile protein expression in bodily fluids, such as in sera of healthy or diseased subjects, as well as in subjects pre- and post-drug treatment.

[0236] Protein capture arrays typically comprise a plurality of protein-capture agents each of which defines a spatially distinct feature of the array. The protein-capture agent can be any molecule or complex of molecules which has the ability to bind a protein and immobilize it to the site of the protein-capture agent on the array. The protein-capture agent may be a protein whose natural function in a cell is to specifically bind another protein, such as an antibody or a receptor. Alternatively, the protein-capture agent may instead be a partially or wholly synthetic or recombinant protein which specifically binds a protein. Alternatively, the protein-capture agent may be a protein which has been selected in vitro from a mutagenized, randomized, or completely random and synthetic library by its binding affinity to a specific protein or peptide target. The selection method used may optionally have been a display method such as ribosome display or phage display, as known in the art. Alternatively, the protein-capture agent obtained via in vitro selection may be a DNA or RNA aptamer which specifically binds a protein target (see, e.g., Potyrailo et al., 1998 Anal. Chem. 70:3419-3425; Cohen et al., 1998, Proc. Natl. Acad. Sci. USA 95:14272-14277; Fukuda, et al., 1997 Nucleic Acids Symp. Ser. 37:237-238; available from SomaLogic). For example, aptamers are selected from libraries of oligonucleotides by the Selex™ process and their interaction with protein can be enhanced by covalent attachment, through incorporation of brominated deoxyuridine and UV-activated crosslinking (photoaptamers). Aptamers have the advantages of ease of production by automated oligonucleotide synthesis and the stability and robustness of DNA; universal fluorescent protein stains can be used to detect binding. Alternatively, the in vitro selected protein-capture agent may be a polypeptide (e.g., an antigen) (see, e.g., Roberts and Szostak, 1997 Proc. Natl. Acad. Sci. USA, 94:12297-12302).

[0237] An alternative to an array of capture molecules is one made through ‘molecular imprinting’ technology, in which peptides (e.g., from the C-terminal regions of proteins) are used as templates to generate structurally complementary, sequence-specific cavities in a polymerizable matrix; the cavities can then specifically capture (denatured) proteins which have the appropriate primary amino acid sequence (e.g., available from ProteinPrint™ and Aspira Biosystems).

[0238] Exemplary protein capture arrays include arrays comprising spatially addressed antigen-binding molecules, commonly referred to as antibody arrays, which can facilitate extensive parallel analysis of numerous proteins defining a proteome or subproteome. Antibody arrays have been shown to have the required properties of specificity and acceptable background, and some are available commercially (e.g., BD Biosciences, Clontech, BioRad and Sigma). Various methods for the preparation of antibody arrays have been reported (see, e.g., V. Lopez et al., 2003 J. Chromatogr. B 787:19-27; Cahill, 2000 Trends in Biotechnology 7:47-51; U.S. Pat. App. Pub. 2002/0055186; U.S. Pat. App. Pub. 2003/0003599; PCT publication WO 03/062444; PCT publication WO 03/077851; PCT publication WO 02/59601; PCT publication WO 02/39120; PCT publication WO 01/79849; PCT publication WO 99/39210). The antigen-binding molecules of such arrays may recognize at least a subset of proteins expressed by a cell or population of cells, illustrative examples of which include growth factor receptors, hormone receptors, neurotransmitter receptors, catecholamine receptors, amino acid derivative receptors, cytokine receptors, extracellular matrix receptors, antibodies, lectins, cytokines, serpins, proteases, kinases, phosphatases, ras-like GTPases, hydrolases, steroid hormone receptors, transcription factors, heat-shock transcription factors, DNA-binding proteins, zinc-finger proteins, leucine-zipper proteins, homeodomain proteins, intracellular signal transduction modulators and effectors, apoptosis-related factors, DNA synthesis factors, DNA repair factors, DNA recombination factors, cell-surface antigens, hepatitis C virus (HCV) proteases and HIV proteases.

[0239] Antigen-binding molecules for antibody arrays are made either by conventional immunization (e.g., polyclonal sera and hybridomas), or as recombinant fragments, usually expressed in E. coli, after selection from phage display or ribosome display libraries (e.g., available from Cambridge Antibody Technology, Bioinvent, Affitech and Biosite). Alternatively, ‘combibodies’ comprising non-covalent associations of VH and VL domains, can be produced in a matrix format created from combinations of diabody-producing bacterial clones (e.g., available from Domantis). Exemplary antigen-binding molecules for use as protein-capture agents include monoclonal antibodies, polyclonal antibodies, Fv, Fab, Fab′ and F(ab′)₂ immunoglobulin fragments, synthetic stabilized Fv fragments, e.g., single chain Fv fragments (scFv), disulfide stabilized Fv fragments (dsFv), single variable region domains (dAbs) minibodies, combibodies and multivalent antibodies such as diabodies and multi-scFv, single domains from camelids or engineered human equivalents.

[0240] Individual spatially distinct protein-capture agents are typically attached to a support surface, which is generally planar or contoured. Common physical supports include glass slides, silicon, microwells, nitrocellulose or PVDF membranes, and magnetic and other microbeads.

[0241] While microdrops of protein delivered onto planar surfaces are widely used, related alternative architectures include CD centrifugation devices based on developments in microfluidics (e.g., available from Gyros) and specialized chip designs, such as engineered microchannels in a plate (e.g., The Living Chip™, available from Biotrove) and tiny 3D posts on a silicon surface (e.g., available from Zyomyx).

[0242] Particles in suspension can also be used as the basis of arrays, providing they are coded for identification; systems include color-coding for microbeads (e.g., available from Luminex, Bio-Rad and Nanomics Biosystems) and semiconductor nanocrystals (e.g., Qdots™, available from Quantum Dots), and barcoding for beads (UltraPlex™, available from Smartbeads) and multimetal microrods (Nanobarcodes™ particles, available from Surromed). Beads can also be assembled into planar arrays on semiconductor chips (e.g., available from LEAPS technology and BioArray Solutions). Where particles are used, individual protein-capture agents are typically attached to an individual particle to provide the spatial definition or separation of the array. The particles may then be assayed separately, but in parallel, in a compartmentalized way, for example in the wells of a microtiter plate or in separate test tubes.

[0243] In operation, a protein sample, which is optionally fragmented to form peptide fragments (see, e.g., U.S. Pat. App. Pub. 2002/0055186), is delivered to a protein-capture array under conditions suitable for protein or peptide binding, and the array is washed to remove unbound or non-specifically bound components of the sample from the array. Next, the presence or amount of protein or peptide bound to each feature of the array is detected using a suitable detection system. The amount of protein bound to a feature of the array may be determined relative to the amount of a second protein bound to a second feature of the array. In certain embodiments, the amount of the second protein in the sample is already known or known to be invariant.

[0244] For analyzing differential expression of proteins between two cells or cell populations, a protein sample of a first cell or population of cells is delivered to the array under conditions suitable for protein binding. In an analogous manner, a protein sample of a second cell or population of cells to a second array, is delivered to a second array which is identical to the first array. Both arrays are then washed to remove unbound or non-specifically bound components of the sample from the arrays. In a final step, the amounts of protein remaining bound to the features of the first array are compared to the amounts of protein remaining bound to the corresponding features of the second array. To determine the differential protein expression pattern of the two cells or populations of cells, the amount of protein bound to individual features of the first array is subtracted from the amount of protein bound to the corresponding features of the second array.

[0245] In an illustrative example, fluorescence labeling can be used for detecting protein bound to the array. The same instrumentation as used for reading DNA microarrays is applicable to protein-capture arrays. For differential display, capture arrays (e.g. antibody arrays) can be probed with fluorescently labeled proteins from two different cell states, in which cell lysates are labeled with different fluorophores (e.g., Cy-3 and Cy-5) and mixed, such that the color acts as a readout for changes in target abundance. Fluorescent readout sensitivity can be amplified 10-100 fold by tyramide signal amplification (TSA) (e.g., available from PerkinElmer Lifesciences). Planar waveguide technology (e.g., available from Zeptosens) enables ultrasensitive fluorescence detection, with the additional advantage of no washing procedures. High sensitivity can also be achieved with suspension beads and particles, using phycoerythrin as label (e.g., available from Luminex) or the properties of semiconductor nanocrystals (e.g., available from Quantum Dot). Fluorescence resonance energy transfer has been adapted to detect binding of unlabelled ligands, which may be useful on arrays (e.g., available from Affibody). Several alternative readouts have been developed, including adaptations of surface plasmon resonance (e.g., available from HTS Biosystems and Intrinsic Bioprobes), rolling circle DNA amplification (e.g., available from Molecular Staging), mass spectrometry (e.g., available from Sense Proteomic, Ciphergen, Intrinsic and Bioprobes), resonance light scattering (e.g., available from Genicon Sciences) and atomic force microscopy (e.g., available from BioForce Laboratories). A microfluidics system for automated sample incubation with arrays on glass slides and washing has been co-developed by NextGen and Perkin Elmer Life Sciences.

[0246] In certain embodiments, the techniques used for detection of stress marker expression products will include internal or external standards to permit quantitative or semi-quantitative determination of those products, to thereby enable a valid comparison of the level or functional activity of these expression products in a biological sample with the corresponding expression products in a reference sample or samples. Such standards can be determined by the skilled practitioner using standard protocols. In specific examples, absolute values for the level or functional activity of individual expression products are determined.

[0247] In specific embodiments, the diagnostic method is implemented using a system as disclosed, for example, in International Publication No. WO 02/090579 and in copending PCT Application No. PCT/AU03/01517 filed Nov. 14, 2003, comprising at least one end station coupled to a base station. The base station is typically coupled to one or more databases comprising predetermined data from a number of individuals representing the level or functional activity of stress marker expression products, together with indications of the actual status of the individuals (e.g., presence, absence, degree, stage of stress or risk of development of stress sequelae) when the predetermined data was collected. In operation, the base station is adapted to receive from the end station, typically via a communications network, subject data representing a measured or normalized level or functional activity of at least one expression product in a biological sample obtained from a test subject and to compare the subject data to the predetermined data stored in the database(s). Comparing the subject and predetermined data allows the base station to determine the status of the subject in accordance with the results of the comparison. Thus, the base station attempts to identify individuals having similar parameter values to the test subject and once the status has been determined on the basis of that identification, the base station provides an indication of the diagnosis to the end station.

[0248] 7.3 Kits

[0249] All the essential materials and reagents required for detecting and quantifying stress marker gene expression products may be assembled together in a kit. The kits may also optionally include appropriate reagents for detection of labels, positive and negative controls, washing solutions, blotting membranes, microtiter plates dilution buffers and the like. For example, a nucleic acid-based detection kit may include (i) a stress marker polynucleotide (which may be used as a positive control), (ii) a primer or probe that specifically hybridizes to a stress marker polynucleotide. Also included may be enzymes suitable for amplifying nucleic acids including various polymerases (Reverse Transcriptase, Taq, Sequenase™ DNA ligase etc. depending on the nucleic acid amplification technique employed), deoxynucleotides and buffers to provide the necessary reaction mixture for amplification. Such kits also generally will comprise, in suitable means, distinct containers for each individual reagent and enzyme as well as for each primer or probe. Alternatively, a protein-based detection kit may include (i) a stress marker polypeptide (which may be used as a positive control), (ii) an antigen-binding molecule that is immuno-interactive with a stress marker polynucleotide. The kit can also feature various devices and reagents for performing one of the assays described herein; and/or printed instructions for using the kit to quantify the expression of a stress marker gene.

[0250] 7.4 Monitoring Immune Function

[0251] The present invention also provides methods for monitoring immune function by measuring the level or functional activity of an expression product of one or more stress marker genes in a subject. When the measured level or functional activity is the same as or similar to the measured level or functional activity of a corresponding expression product in a reference sample obtained from one or more normal subjects or from one or more subjects not under stress, this generally indicates that the subject is not under stress and has normal immune function. Conversely, when the measured level or functional activity is different than the measured level or functional activity of the corresponding expression product, this generally indicates that the subject is under stress and consequently has reduced immune function (or immunosuppression).

[0252] The normalcy of immune function is important to the effective combat of disease and ultimate protection to natural challenge. In addition, it is vital to obtain an effective immune response to vaccination, and, in this regard, the identified stress markers can also be used to monitor the immune system of individuals so that vaccination can be timed to produce an immune response that leads to the best level of protection. For instance, in the context of athletic performance animals such as human athletes and racehorses, monitoring the immune system in this fashion allows the performance animal or his/her/its trainer to reduce potential stressors that may lead to an inappropriate or non-protective immune response to vaccination. When the performance animal's immune system has recovered, as determined by monitoring using the identified stress markers, vaccination can be performed.

[0253] Also, the identified stress markers can be used to assess the immune system's response to vaccine preparations. An inappropriate immune response to an initial vaccination may lead to a decision to revaccinate, or to modify the vaccination regimen, or to delay a vaccination regimen until potential stressors (that affect immune function) are removed and the animal's immune system has recovered.

[0254] By way of example, there are known vaccine preparations available for Equine Herpes Virus. It is widely used in the veterinary field, especially in pregnant mares so that foals will be afforded some protection through transfer of milk antibodies (colostrum). Pregnancy and the puerperal periods are times of high stress and immune modulation. Immune function can be monitored during these periods using the identified stress markers, to time vaccination so that appropriate and protective vaccine responses are generated. Alternatively, stress marker levels could be used to modify the vaccination regimen depending upon the monitored immune response to vaccination.

### 8. Methods of Treatment or Prophylaxis

[0255] The present invention also extends to the treatment or prevention of stress in subjects following positive diagnosis for the risk of development of stress sequelae in the subjects. Generally, the treatment will include administering to a positively diagnosed subject an effective amount of an agent or therapy that ameliorates the symptoms or reverses the development of stress or that reduces or abrogates a stress-related condition as described for example above, or that reduces potential of the subject to developing a stress-related condition. Current agents suitable for treating stress include, but are not limited to corticotropin-releasing factor antagonists as described, for example, in U.S. Pat. Nos. 6,723,721, 6,670,371, 6,664,261, 6,586,456, 6,548,509, 6,323,312, 6,255,310; glucocorticoid receptor antagonists as disclosed in U.S. Patent Application Publication No. 20020169152; adenosine compounds as described, for example, in U.S. Pat. No. 6,642,209; nitric oxide donors as described, for example in U.S. Pat. No. 6,455,542; nutritional compositions as described for example in U.S. Pat. Nos. 6,444,700, 6,391,332 and 6,218,420; herbal extracts as disclosed, for example, in U.S. Pat. No. 6,416,795; NK-1 receptor antagonists as disclosed, for example, in U.S. Pat. No. 6,087,348; fatty acid-based compositions as described, for example, in U.S. Pat. No. 6,077,867; peptide derivatives from yeast as disclosed, for example, in U.S. Patent Application Publication No. 20040101934; and zinc ionophores as described, for example, in U.S. Patent Application No. 20020183300;

[0256] Alternatively, the subject may be treated using stress-relieving processes known in the art including for example: removing or decreasing the level of stressor in the subject's environment; and altering ion flux across cell membranes with electric fields as described in U.S. Patent Application Publication No. 20030233124.

[0257] However, it will be understood that the present invention encompasses any agent or process that is useful for treating or preventing stress and is not limited to the aforementioned illustrative compounds and formulations.

[0258] Typically, stress-relieving agents will be administered in pharmaceutical (or veterinary) compositions together with a pharmaceutically acceptable carrier and in an effective amount to achieve their intended purpose. The dose of active compounds administered to a subject should be sufficient to achieve a beneficial response in the subject over time such as a reduction in, or relief from, the symptoms of stress. The quantity of the pharmaceutically active compounds(s) to be administered may depend on the subject to be treated inclusive of the age, sex, weight and general health condition thereof. In this regard, precise amounts of the active compound(s) for administration will depend on the judgement of the practitioner. In determining the effective amount of the active compound(s) to be administered in the treatment or prevention of stress, the physician or veterinarian may evaluate severity of any symptom associated with the presence of stress including symptoms related to stress sequelae as mentioned above. In any event, those of skill in the art may readily determine suitable dosages of the stress relieving agents and suitable treatment regimens without undue experimentation.

[0259] The stress relieving agents may be administered in concert with adjunctive therapies to reduce an aberrant immune response in the subject. Illustrative examples of such adjunctive therapies include but are not limited to, removal of the stressor, yoga, meditation, acupuncture, massage, mild exercise and breathing exercises.

[0260] In order that the invention may be readily understood and put into practical effect, particular preferred embodiments will now be described by way of the following non-limiting examples.

### EXAMPLES

### Example 1

### Identification of Specific Diagnostic Genes for Stress

[0261] Blood samples obtained from 20 animals exposed to transport stress over 48 hours were analyzed using GeneChips™ (method of use is described below in detail in “Generation of Gene Expression Data”) containing thousands of genes expressed in white blood cells of horses. Analysis of these data (see “Identification of Responding Genes and Demonstration of Diagnostic Potential” below) reveals specific genes that are expressed differentially at day 0 through to day 28. It is possible to design an assay that measures the RNA level in the sample using at least one and desirably at least two stress marker genes representative sequences of which are set forth in SEQ ID NO: 1, 3, 4, 5, 7, 9, 11, 13, 15, 16, 17, 19, 21, 23, 24, 25, 26, 28, 29, 30, 32, 33, 34, 35, 37, 38, 39, 40, 41, 42, 44, 46, 48, 50, 51, 52, 54, 55, 56, 57, 59, 62, 63, 64, 66, 68, 70, 71, 73, 75, 77, 79, 81, 83, 85, 87, 89, 90, 91, 92, 93, 95, 96, 97, 99, 101, 103, 105, 107, 108, 109, 111, 113, 115, 117, 118, 119, 121, 123, 125, 126, 127, 129, 130, 131, 133, 135, 137, 139, 141, 143, 144, 145, 147, 148, 150, 151, 153, 155, 156, 158, 160, 161, 163, 164, 165, 167, 169, 170, 171, 173, 175, 176, 178, 180, 182, 184, 185, 186, 187, 188, 190, 192, 194, 195, 196, 198, 200, 202, 204, 206, 208, 210, 212, 214, 216, 218, 220, 222, 224, 226, 228, 230, 232, 233, 234, 236, 238, 239, 240, 241, 242, 243, 244, 246 or 248.

### Materials and Methods

### Blood Collection

[0262] Blood is collected from a horse (in a non-agitated state) for the purpose of extraction of high quality RNA or protein. Suitable blood collection tubes for the collection, preservation, transport and isolation of RNA include PAXgene™ tubes (PreAnalytix Inc., Valencia, Calif., USA). Alternatively, blood can be collected into tubes containing solutions designed for the preservation of nucleic acids (available from Roche, Ambion, Invitrogen and ABI). For the determination of protein levels, 50 mL of blood is prevented from clotting by collection into a tube containing 4 mL of 4% sodium citrate. White blood cells and plasma are isolated and stored frozen for later analysis and detection of specific proteins. PAXgene tubes can be kept at room temperature prior to RNA extraction. Clinical signs are recorded in a standard format.

### Total RNA Extraction

[0263] A kit available from Qiagen Inc (Valencia, Calif., USA) has the reagents and instructions for the isolation of total RNA from 2.5 mL blood collected in the PAXgene Blood RNA Tube. Isolation begins with a centrifugation step to pellet nucleic acids in the PAXgene blood RNA tube. The pellet is washed and resuspended and incubated in optimized buffers together with Proteinase K to bring about protein digestion. An additional centrifugation is carried out to remove residual cell debris and the supernatant is transferred to a fresh microcentrifuge tube. Ethanol is added to adjust binding conditions, and the lysate is applied to the PAXgene RNA spin column. During brief centrifugation, RNA is selectively bound to the silica-gel membrane as contaminants pass through. Remaining contaminants are removed in three efficient wash steps and RNA is then eluted in Buffer BR5.

[0264] Determination of RNA quantity and quality is necessary prior to proceeding and can be achieved using an Agilent Bioanalyzer and Absorbance 260/280 ratio using a spectrophotometer.

### DNA Extraction

[0265] A kit available from Qiagen Inc (Valencia, Calif., USA) has the reagents and instructions for the isolation of total DNA from 8.5 mL blood collected in the PAXgene Blood DNA Tube. Isolation begins with the addition of additional lysis solution followed by a centrifugation step. The pellet is washed and resuspended and incubated in optimized buffers together with Proteinase K to bring about protein digestion. DNA is precipitated using alcohol and an additional centrifugation is carried out to pellet the nucleic acid. Remaining contaminants are removed in a wash step and the DNA is then resuspended in Buffer BG4.

[0266] Determination of DNA quantity and quality is necessary prior to proceeding and can be achieved using a spectrophotometer or agarose gel electrophoresis.

### Generation of Gene Expression Data

### Choice of Method

[0267] Measurement of specific RNA levels in a tissue sample can be achieved using a variety of technologies. Two common and readily available technologies that are well known in the art are:

[0268] GeneChip® analysis using Affymetrix technology.

[0269] Real-Time Polymerase Chain Reaction (TaqMan™ from Applied Biosystems for example).

[0270] GeneChips® quantitate RNA by detection of labeled cRN-A hybridized to short oligonucleotides built on a silicon substrate. Details on the technology and methodology can be found at www.affymetrix.com.

[0271] Real-Time Polymerase Chain Reaction (RT-PCR) quantitates RNA using two PCR primers, a labeled probe and a thermostable DNA polymerase. As PCR product is generated a dye is released into solution and detected. Internal controls such as 18S RNA probes are often used to determine starting levels of total RNA in the sample. Each gene and the internal control are run separately. Details on the technology and methods can be found at www.appliedbiosytems.com or www.qiagen.com or www.biorad.com. Applied Biosystems offer a service whereby the customer provides DNA sequence information and payment and is supplied in return all of the reagents required to perform RT-PCR analysis on individual genes.

[0272] GeneChip® analysis has the advantage of being able to analyze thousands of genes at a time. However it is expensive and takes over 3 days to perform a single assay. RT-PCR generally only analyses one gene at a time, but is inexpensive and can be completed within a single day.

[0273] RT-PCR is the method of choice for gene expression analysis if the number of specific genes to be analyzed is less than 20. GeneChip® or other gene expression analysis technologies (such as Illumina Bead Arrays) are the method of choice when many genes need to be analysed simultaneously.

[0274] The methodology for GeneChip® data generation and analysis and Real Time PCR is presented below in brief.

### GeneChip® Data Generation

[0275] cDNA & cRNA Generation

[0276] The following method for cDNA and cRNA generation from total RNA has been adapted from the protocol provided and recommended by Affymetrix (www.affymetrix.com).

[0277] The steps are:
[0278] A total of 3 μg of total RNA is used as a template to generate double stranded cDNA.
[0279] cRNA is generated and labeled using biotinylated Uracil (dUTP).
[0280] biotin-labeled cRNA is cleaned and the quantity determined using a spectrophotometer and MOPS gel analysis.
[0281] labeled cRNA is fragmented to ˜300 bp in size.
[0282] RNA quantity is determined on an Agilent “Lab-on-a-Chip” system (Agilent Technologies).

[0283] Hybridization Washing & Staining:

[0284] The steps are:
[0285] A hybridization cocktail is prepared containing 0.05 μg/μL of labeled and fragmented cRNA, spike-in positive hybridization controls, and the Affymetrix oligonucleotides B2, bioB, bioC, bioD and cre.
[0286] The final volume (80 μL) of the hybridization cocktail is added to the GeneChip™ cartridge.
[0287] The cartridge is placed in a hybridization oven at constant rotation for 16 hours.
[0288] The fluid is removed from the GeneChip™ and stored.
[0289] The GeneChip™ is placed in the fluidics station.
[0290] The experimental conditions for each GeneChip™ are recorded as an .EXP file.
[0291] All washing and staining procedures are carried out by the Affymetrix fluidics station with an attendant providing the appropriate solutions.
[0292] The GeneChip™ is washed, stained with steptavidin-phycoerythin dye and then washed again using low salt solutions.
[0293] After the wash protocols are completed, the dye on the probe array is ‘excited’ by laser and the image captured by a CCD camera using an Affymetrix Scanner (manufactured by Agilent).

[0294] Scanning & Data File Generation:

[0295] The scanner and MAS 5 software generates an image file from a single GeneChip™ called a .DAT file (see figure overleaf).

[0296] The .DAT file is then pre-processed prior to any statistical analysis.

[0297] Data pre-processing steps (prior to any statistical analysis) include:
[0298] .DAT File Quality Control (QC).
[0299] .CEL File Generation.
[0300] Scaling and Normalization.

[0301] .DAT File Quality Control

[0302] The .DAT file is an image. The image is inspected manually for artifacts (e.g. high/low intensity spots, scratches, high regional or overall background). (The B2 oligonucleotide hybridization performance is easily identified by an alternating pattern of intensities creating a border and array name.) The MAS 5 software used the B2 oligonucleotide border to align a grid over the image so that each square of oligonucleotides was centered and identified.

[0303] The other spiked hybridization controls (bioB, bioC, bioD and cre) are used to evaluate sample hybridization efficiency by reading “present” gene detection calls with increasing signal values, reflecting their relative concentrations. (If the .DAT file is of suitable quality it is converted to an intensity data file (.CEL file) by Affymetrix MAS 5 software).

[0304] .CEL File Generation

[0305] The .CEL files generated by the MAS 5 software from .DAT files contain calculated raw intensities for the probe sets. Gene expression data is obtained by subtracting a calculated background from each cell value. To eliminate negative intensity values, a noise correction fraction based from a local noise value from the standard deviation of the lowest 2% of the background is applied.

[0306] All .CEL files generated from the GeneChip™ are subjected to specific quality metrics parameters.

[0307] Some metrics are routinely recommended by Affymetrix and can be determined from Affymetrix internal controls provided as part of the GeneChip™. Other metrics are based on experience and the processing of many GeneChip™.

### Analysis of GeneChip® Data

[0308] Three illustrative approaches to normalizing data might be used:
[0309] Affymetrix MAS 5 Algorithm.
[0310] Robust Multi-chip Analysis (RMA) algorithm of Irizarry (Irizarray et al., 2002, Biostatistics (in print)).
[0311] Robust Multi-chip Analysis Saved model (RMAS).

[0312] Those of skill in the art will recognize that many other approaches might be adopted, without materially affecting the invention.

### Affymetrix MAS 5 Algorithm

[0313] .CEL files are used by Affymetrix MAS 5 software to normalize or scale the data. Scaled data from one chip are compared to similarly scaled data from other chips.

[0314] Affymetrix MAS 5 normalization is achieved by applying the default “Global Scaling” option of the MAS 5 algorithm to the .CEL files. This procedure subtracts a robust estimate of the center of the distribution of probe values, and divides by a robust estimate of the probe variability. This produces a set of chips with common location and scale at the probe level.

[0315] Gene expression indices are generated by a robust averaging procedure on all the probe pairs for a given gene. The results are constrained to be non-negative.

[0316] Given that scaling takes place at the level of the probe, rather than at the level of the gene, it is possible that even after normalization there may be chip-to-chip differences in overall gene expression level. Following standard MAS5 normalization, values for each gene were de-trended with respect to median chip intensity. That is, values for each gene were regressed on the median chip intensity, and residuals were calculated. These residuals were taken as the de-trended estimates of expression for each gene

[0317] Median chip intensity was calculated using the Affymetrix MAS5 algorithm, but with a scale factor fixed at one.

### RMAS Analysis

[0318] This method is identical to the RMA method, with the exception that probe weights and target quantiles are established using a long term library of chip .cel files, and are not re-calculated for these specific chips. Again, normalization occurs at the probe level.

### Real-Time PCR Data Generation

[0319] Background information for conducting Real-time PCR may be obtained, for example, at http://dorakmt.tripod.com/genetics/realtime.html and in a review by Bustin S A (2000, J Mol Endocrinol 25:169-193).

### TagMan™ Primer and Probe Design Guidelines

[0320] 1. The Primer Express™ (ABI) software designs primers with a melting temperature (Tm) of 58-60° C., and probes with a Tm value of 10° C. higher. The Tm of both primers should be equal;

[0321] 2. Primers should be 15-30 bases in length;

[0322] 3. The G+C content should ideally be 30-80%. If a higher G+C content is unavoidable, the use of high annealing and melting temperatures, cosolvents such as glycerol, DMSO, or 7-deaza-dGTP may be necessary;

[0323] 4. The run of an identical nucleotide should be avoided. This is especially true for G, where runs of four or more Gs is not allowed;

[0324] 5. The total number of Gs and Cs in the last five nucleotides at the 3′ end of the primer should not exceed two (the newer version of the software has an option to do this automatically). This helps to introduce relative instability to the 3′ end of primers to reduce non-specific priming. The primer conditions are the same for SYBR Green assays;

[0325] 6. Maximum amplicon size should not exceed 400 bp (ideally 50-150 bases). Smaller amplicons give more consistent results because PCR is more efficient and more tolerant of reaction conditions (the short length requirement has nothing to do with the efficiency of 5′ nuclease activity);

[0326] 7. The probes should not have runs of identical nucleotides (especially four or more consecutive Gs), G+C content should be 30-80%, there should be more Cs than Gs, and not a G at the 5′ end. The higher number of Cs produces a higher ΔRn. The choice of probe should be made first;

[0327] 8. To avoid false-positive results due to amplification of contaminating genomic DNA in the cDNA preparation, it is preferable to have primers spanning exon-exon junctions. This way, genomic DNA will not be amplified (the PDAR kit for human GAPDH amplification has such primers);

[0328] 9. If a TaqMan™ probe is designed for allelic discrimination, the mismatching nucleotide (the polymorphic site) should be in the middle of the probe rather than at the ends;

[0329] 10. Use primers that contain dA nucleotides near the 3′ ends so that any primer-dimer generated is efficiently degraded by AmpErase™ UNG (mentioned in p. 9 of the manual for EZ RT-PCR kit; P/N 402877). If primers cannot be selected with dA nucleotides near the ends, the use of primers with 3′ terminal dU-nucleotides should be considered.

[0330] (See Also the General Principles of PCR Primer Design by Invitrogen.)

### General Method

[0331] 1. Reverse transcription of total RNA to cDNA should be done with random hexamers (not with oligo-dT). If oligo-dT has to be used long mRNA transcripts or amplicons greater than two kilobases upstream should be avoided, and 18S RNA cannot be used as normaliser;

[0332] 2. Multiplex PCR will only work properly if the control primers are limiting (ABI control reagents do not have their primers limited);

[0333] 3. The range of target cDNA used is 10 ng to 1 μg. If DNA is used (mainly for allelic discrimination studies), the optimum amount is 100 ng to 1 μg;

[0334] 4. It is ideal to treat each RNA preparation with RNAse free DNAse to avoid genomic DNA contamination. Even the best RNA extraction methods yield some genomic DNA. Of course, it is ideal to have primers not amplifying genomic DNA at all but sometimes this may not be possible;

[0335] 5. For optimal results, the reagents (before the preparation of the PCR mix) and the PCR mixture itself (before loading) should be vortexed and mixed well. Otherwise there may be shifting Rn value during the early (0-5) cycles of PCR. It is also important to add probe to the buffer component and allow it to equilibrate at room temperature prior to reagent mix formulation.

### TaqMan™ Primers and Probes

[0336] The TaqMan™ probes ordered from ABI at midi-scale arrive already resuspended at 100 μM. If a 1/20 dilution is made, this gives a 5 μM solution. This stock solution should be aliquoted, frozen and kept in the dark. Using 1 μL of this in a 50 μL reaction gives the recommended 100 nM final concentration.

[0337] The primers arrive lyophilized with the amount given on the tube in pmols (such as 150.000 pmol which is equal to 150 nmol). If X mmol of primer is resuspended in X μL of H₂O, the resulting solution is 1 mM. It is best to freeze this stock solution in aliquots. When the 1 mM stock solution is diluted 1/100, the resulting working solution will be 10 μM. To get the recommended 50-900 nM final primer concentration in 50 μL reaction volume, 0.25-4.50 μL should be used per reaction (2.5 μL for 500 nM final concentration).

[0338] The PDAR primers and probes are supplied as a mix in one tube. They have to be used 2.5 μL in a 50 μL reaction volume.

### Setting Up One-Step TaqMan™ Reaction

[0339] One-step real-time PCR uses RNA (as opposed to cDNA) as a template. This is the preferred method if the RNA solution has a low concentration but only if singleplex reactions are run. The disadvantage is that RNA carryover prevention enzyme AmpErase cannot be used in one-step reaction format. In this method, both reverse transcriptase and real-time PCR take place in the same tube. The downstream PCR primer also acts as the primer for reverse transcriptase (random hexamers or oligo-dT cannot be used for reverse transcription in one-step RT-PCR). One-step reaction requires higher dNTP concentration (greater than or equal to 300 mM vs 200 mM) as it combines two reactions needing dNTPs in one. A typical reaction mix for one-step PCR by Gold RT-PCR kit is as follows:

| Reagents | Volume |
|---|---|
| H₂O + RNA: | 20.5 μL [24 μL if PDAR is used] |
| 10X TaqMan buffer: | 5.0 μL |
| MgCl₂ (25 mM): | 11.0 μL |
| dATP (10 mM): | 1.5 μL [for final concentration of 300 μM] |
| dCTP (10 mM): | 1.5 μL [for final concentration of 300 μM] |
| dGTP (10 mM): | 1.5 μL [for final concentration of 300 μM] |
| dUTP (20 mM): | 1.5 μL [for final concentration of 600 μM] |
| Primer F (10 μM)*: | 2.5 μL [for final concentration of 500 nM] |
| Primer R (10 μM)*: | 2.5 μL [for final concentration of 500 nM] |
| TaqMan Probe*: | 1.0 μL [for final concentration of 100 nM] |
| AmpliTaq Gold: | 0.25 μL [can be increased for higher efficiency] |
| Reverse Transcriptase: | 0.25 μL |
| RNAse inhibitor: | 1.00 μL |

[0340] If a PDAR is used, 2.5 μL of primer+probe mix used.

[0341] Ideally 10 pg-100 ng RNA should be used in this reaction. Note that decreasing the amount of template from 100 ng to 50 ng will increase the C_{T} value by 1. To decrease a C_{T} value by 3, the initial amount of template should be increased 8-fold. ABI claims that 2 picograms of RNA can be detected by this system and the maximum amount of RNA that can be used is 1 microgram. For routine analysis, 10 pg-100 ng RNA and 100 pg-1 μg genomic DNA can be used.

### Cycling Parameters for One-Step PCR

[0342] Reverse transcription (by MuLV) 48° C. for 30 min.

[0343] AmpliTaq activation 95° C. for 10 min.

[0344] PCR: denaturation 95° C. for 15 sec and annealing/extension 60° C. for 1 min (repeated 40 times) (On ABI 7700, minimum holding time is 15 seconds.)

[0345] The recently introduced EZ One-step™ RT-PCR kit allows the use of UNG as the incubation time for reverse transcription is 60° C. thanks to the use of a thermostable reverse transcriptase. This temperature also a better option to avoid primer dimers and non-specific bindings at 48° C.

### Operating the ABI 7700

[0346] Make sure the following before starting a run:

[0347] 1. Cycle parameters are correct for the run;

[0348] 2. Choice of spectral compensation is correct (off for singleplex, on for multiplex reactions);

[0349] 3. Choice of “Number of PCR Stages” is correct in the Analysis Options box (Analysis/Options). This may have to be manually assigned after a run if the data is absent in the amplification plot but visible in the plate view, and the X-axis of the amplification is displaying a range of 0-1 cycles;

[0350] 4. No Template Control is labeled as such (for accurate ΔRn calculations);

[0351] 5. The choice of dye component should be made correctly before data analysis;

[0352] 6. You must save the run before it starts by giving it a name (not leaving as untitled);

[0353] 7. Also at the end of the run, first save the data before starting to analyze.

[0354] The ABI software requires extreme caution. Do not attempt to stop a run after clicking on the Run button. You will have problems and if you need to switch off and on the machine, you have to wait for at least an hour to restart the run.

[0355] When analyzing the data, remember that the default setting for baseline is 3-15. If any C_{T} value is <15, the baseline should be changed accordingly (the baseline stop value should be 1-2 smaller than the smallest C_{T} value). For a useful discussion of this matter, see the ABI Tutorial on Setting Baselines and Thresholds. (Interestingly, this issue is best discussed in the manual for TaqMan™ Human Endogenous Control Plate.)

[0356] If the results do not make sense, check the raw spectra for a possible CDC camera saturation during the run. Saturation of CDC camera may be prevented by using optical caps rather than optical adhesive cover. It is also more likely to happen when SYBR Green I is used, when multiplexing and when a high concentration of probe is used.

### Interpretation of Results

[0357] At the end of each reaction, the recorded fluorescence intensity is used for the following calculations:

[0358] Rn⁺ is the Rn value of a reaction containing all components, Rn⁻ is the Rn value of an unreacted sample (baseline value or the value detected in NTC). ΔRn is the difference between Rn⁺ and Rn⁻. It is an indicator of the magnitude of the signal generated by the PCR.

[0359] There are three illustrative methods to quantitate the amount of template:

[0360] 1. Absolute standard method: In this method, a known amount of standard such as in vitro translated RNA (cRNA) is used;

[0361] 2. Relative standard: Known amounts of the target nucleic acid are included in the assay design in each run;

[0362] 3. Comparative C_{T} method: This method uses no known amount of standard but compares the relative amount of the target sequence to any of the reference values chosen and the result is given as relative to the reference value (such as the expression level of resting lymphocytes or a standard cell line).

### The Comparative CT Method (ΔΔCT) for Relative Quantitation of Gene Expression

[0363] This method enables relative quantitation of template and increases sample throughput by eliminating the need for standard curves when looking at expression levels relative to an active reference control (normaliser). For this method to be successful, the dynamic range of both the target and reference should be similar. A sensitive method to control this is to look at how ΔC_{T} (the difference between the two CT values of two PCRs for the same initial template amount) varies with template dilution. If the efficiencies of the two amplicons are approximately equal, the plot of log input amount versus ΔC_{T} will have a nearly horizontal line (a slope of <0.10). This means that both PCRs perform equally efficiently across the range of initial template amounts. If the plot shows unequal efficiency, the standard curve method should be used for quantitation of gene expression. The dynamic range should be determined for both (1) minimum and maximum concentrations of the targets for which the results are accurate and (2) minimum and maximum ratios of two gene quantities for which the results are accurate. In conventional competitive RT-PCR, the dynamic range is limited to a target-to-competitor ratio of about 10:1 to 1:10 (the best accuracy is obtained for 1:1 ratio). The real-time PCR is able to achieve a much wider dynamic range.

[0364] Running the target and endogenous control amplifications in separate tubes and using the standard curve method requires the least amount of optimization and validation. The advantage of using the comparative C_{T} method is that the need for a standard curve is eliminated (more wells are available for samples). It also eliminates the adverse effect of any dilution errors made in creating the standard curve samples.

[0365] As long as the target and normaliser have similar dynamic ranges, the comparative C_{T} method (ΔΔC_{T} method) is the most practical method. It is expected that the normaliser will have a higher expression level than the target (thus, a smaller C_{T} value). The calculations for the quantitation start with getting the difference (ΔC_{T}) between the C_{T} values of the target and the normaliser:

ΔC_{T}=C_{T} (target)−C_{T} (normaliser)

[0366] This value is calculated for each sample to be quantitated (unless, the target is expressed at a higher level than the normaliser, this should be a positive value. It is no harm if it is negative). One of these samples should be chosen as the reference (baseline) for each comparison to be made. The comparative ΔΔC_{T} calculation involves finding the difference between each sample's ΔC_{T} and the baseline's ΔC_{T}. If the baseline value is representing the minimum level of expression, the ΔΔC_{T} values are expected to be negative (because the ΔC_{T} for the baseline sample will be the largest as it will have the greatest C_{T} value). If the expression is increased in some samples and decreased in others, the ΔC_{T} values will be a mixture of negative and positive ones. The last step in quantitation is to transform these values to absolute values. The formula for this is:

comparative expression level=2^{-ΔΔCT}

[0367] For expressions increased compared to the baseline level this will be something like 2³=8 times increase, and for decreased expression it will be something like 2⁻³=⅛ of the reference level. Microsoft Excel can be used to do these calculations by simply entering the C_{T} values (there is an online ABI tutorial at http://www.appliedbiosystems.com/support/tutorials/7700amp/ on the use of spread sheet programs to produce amplification plots; the TaqMan™ Human Endogenous Control Plate protocol also contains detailed instructions on using MS Excel for real-time PCR data analysis).

[0368] The other (absolute) quantification methods are outlined in the ABI User Bulletins (http://docs.appliedbiosystems.com/search.taf?_UserReference=A8658327189850A13A0C598 E). The Bulletins #2 and #5 are most useful for the general understanding of real-time PCR and quantification.

### Recommendations on Procedures

[0369] 1. Use positive-displacement pipettes to avoid inaccuracies in pipetting;

[0370] 2. The sensitivity of real-time PCR allows detection of the target in 2 pg of total RNA. The number of copies of total RNA used in the reaction should ideally be enough to give a signal by 25-30 cycles (preferably less than 100 ng). The amount used should be decreased or increased to achieve this;

[0371] 3. The optimal concentrations of the reagents are as follows;

[0372] i. Magnesium chloride concentration should be between 4 and 7 mM. It is optimized as 5.5 mM for the primers/probes designed using the Primer Express software;

[0373] ii. Concentrations of dNTPs should be balanced with the exception of dUTP (if used). Substitution of dUTP for dTTP for control of PCR product carryover requires twice dUTP that of other dNTPs. While the optimal range for dNTPs is 500 μM to 1 mM (for one-step RT-PCR), for a typical TaqMan reaction (PCR only), 200 μM of each dNTP (400 μM of dUTP) is used;

[0374] iii. Typically 0.25 μL (1.25 U) AmpliTaq DNA Polymerase (5.0 U/μL) is added into each 50 μL reaction. This is the minimum requirement. If necessary, optimization can be done by increasing this amount by 0.25 U increments;

[0375] iv. The optimal probe concentration is 50-200 nM, and the primer concentration is 100-900 nM. Ideally, each primer pair should be optimised at three different temperatures (58, 60 and 62° C. for TaqMan primers) and at each combination of three concentrations (50, 300, 900 nM). This means setting up three different sets (for three temperatures) with nine reactions in each (50/50 mM, 50/300 mM, 50/900, 300/50, 300/300, 300/900, 900/50, 900/300, 900/900 mM) using a fixed amount of target template. If necessary, a second round of optimization may improve the results. Optimal performance is achieved by selecting the primer concentrations that provide the lowest CT and highest ΔRn. Similarly, the probe concentration should be optimized for 25-225 nM;

[0376] 4. If AmpliTaq Gold DNA Polymerase is being used, there has to be a 9-12 min pre-PCR heat step at 92-95° C. to activate it. If AmpliTaq Gold DNA Polymerase is used, there is no need to set up the reaction on ice. A typical TaqMan reaction consists of 2 min at 50° C. for UNG (see below) incubation, 10 min at 95° C. for Polymerase activation, and 40 cycles of 15 sec at 95° C. (denaturation) and 1 min at 60° C. (annealing and extension). A typical reverse transcription cycle (for cDNA synthesis), which should precede the TaqMan reaction if the starting material is total RNA, consists of 10 min at 25° C. (primer incubation), 30 min at 48° C. (reverse transcription with conventional reverse transcriptase) and 5 min at 95° C. (reverse transcriptase inactivation);

[0377] 5. AmpErase uracil-N-glycosylase (UNG) is added in the reaction to prevent the reamplification of carry-over PCR products by removing any uracil incorporated into amplicons. This is why dUTP is used rather than dTTP in PCR reaction. UNG does not function above 55° C. and does not cut single-stranded DNA with terminal dU nucleotides. UNG-containing master mix should not be used with one-step RT-PCR unless rTth DNA polymerase is being used for reverse transcription and PCR (TaqMan EZ RT-PCR kit);

[0378] 6. It is necessary to include at least three No Amplification Controls (NAC) as well as three No Template Controls (NTC) in each reaction plate (to achieve a 99.7% confidence level in the definition of +/−thresholds for the target amplification, six replicates of NTCs must be run). NAC former contains sample and no enzyme. It is necessary to rule out the presence of fluorescence contaminants in the sample or in the heat block of the thermal cycler (these would cause false positives). If the absolute fluorescence of the NAC is greater than that of the NTC after PCR, fluorescent contaminants may be present in the sample or in the heating block of the thermal cycler;

[0379] 7. The dynamic range of a primer/probe system and its normaliser should be examined if the ΔΔC_{T} method is going to be used for relative quantitation. This is done by running (in triplicate) reactions of five RNA concentrations (for example, 0, 80 pg/μL, 400 pg/μL, 2 ng/μL and 50 ng/μL). The resulting plot of log of the initial amount vs C_{T} values (standard curve) should be a (near) straight line for both the target and normaliser real-time RT-PCRs for the same range of total RNA concentrations;

[0380] 8. The passive reference is a dye (ROX) included in the reaction (present in the TaqMan universal PCR master mix). It does not participate in the 5′ nuclease reaction. It provides an internal reference for background fluorescence emission. This is used to normalize the reporter-dye signal. This normalization is for non-PCR-related fluorescence fluctuations occurring well-to-well (concentration or volume differences) or over time and different from the normalization for the amount of cDNA or efficiency of the PCR. Normalization is achieved by dividing the emission intensity of reporter dye by the emission intensity of the passive reference. This gives the ratio defined as Rn;

[0381] 9. If multiplexing is done, the more abundant of the targets will use up all the ingredients of the reaction before the other target gets a chance to amplify. To avoid this, the primer concentrations for the more abundant target should be limited;

[0382] 10. TaqMan Universal PCR master mix should be stored at 2 to 8° C. (not at −20° C.);

[0383] 11. The GAPDH probe supplied with the TaqMan Gold RT-PCR kit is labeled with a JOE reporter dye, the same probe provided within the Pre-Developed TaqMan™ Assay Reagents (PDAR) kit is labeled with VIC. Primers for these human GAPDH assays are designed not to amplify genomic DNA;

[0384] 12. The carryover prevention enzyme, AmpErase UNG, cannot be used with one-step RT-PCR which requires incubation at 48° C. but may be used with the EZ RT-PCR kit;

[0385] 13. One-step RT-PCR can only be used for singleplex reactions, and the only choice for reverse transcription is the downstream primer (not random hexamers or oligo-dT);

[0386] 14. It is ideal to run duplicates to control pipetting errors but this inevitably increases the cost;

[0387] 15. If multiplexing, the spectral compensation option (in Advanced Options) should be checked before the run;

[0388] 16. Normalization for the fluorescent fluctuation by using a passive reference (ROX) in the reaction and for the amount of cDNA/PCR efficiency by using an endogenous control (such as GAPDH, active reference) are different processes;

[0389] 17. ABI 7700 can be used not only for quantitative RT-PCR but also end-point PCR. The latter includes presence/absence assays or allelic discrimination assays (such as SNP typing);

[0390] 18. Shifting Rn values during the early cycles (cycle 0-5) of PCR means initial disequilibrium of the reaction components and does not affect the final results as long as the lower value of baseline range is reset;

[0391] 19. If an abnormal amplification plot has been noted (C_{T} value <15 cycles with amplification signal detected in early cycles), the upper value of the baseline range should be lowered and the samples should be diluted to increase the C_{T} value (a high C_{T} value may also be due to contamination);

[0392] 20. A small ΔRn value (or greater than expected C_{T} value) indicates either poor PCR efficiency or low copy number of the target;

[0393] 21. A standard deviation >0.16 for C_{T} value indicates inaccurate pipetting;

[0394] 22. SYBR Green entry in the Pure Dye Setup should be abbreviated as “SYBR” in capitals. Any other abbreviation or lower case letters will cause problems;

[0395] 23. The SDS software for ABI 7700 have conflicts with the Macintosh Operating System version 8.1. The data should not be analyzed on such computers;

[0396] 24. The ABI 7700 should not be deactivated for extended periods of time. If it has ever been shutdown, it should be allowed to warm up for at least one hour before a run. Leaving the instrument on all times is recommended and is beneficial for the laser. If the machine has been switched on just before a run, an error box stating a firmware version conflict may appear. If this happens, choose the “Auto Download” option;

[0397] 25. The ABI 7700 is only one of the real-time PCR systems available, others include systems from BioRad, Cepheid, Corbett Research, Roche and Stratagene.

### Genotyping Analysis

[0398] Many methods are available to genotype DNA. A review of allelic discrimination methods can be found in Kristensen et al (Biotechniques 30(2): 318-322 (2001). Only one method, allele-specific PCR is described here.

### Primer Design

[0399] Upstream and downstream PCR primers specific for particular alleles can be designed using freely available computer programs, such as Primer3 (http://frodo.wi.mit.edu/primer3/primer3_code.html). Alternatively the DNA sequences of the various alleles can be aligned using a program such as ClustalW (http://www.ebi.ac.uk/clustalw/) and specific primers designed to areas where DNA sequence differences exist but retaining enough specificity to ensure amplification of the correct amplicon. Preferably a PCR amplicon is designed to have a restriction enzyme site in one allele but not the other. Primers are generally 18-25 base pairs in length with similar melting temperatures.

### PCR Amplification

[0400] The composition of PCR reactions has been described elsewhere (Clinical Applications of PCR, Dennis Lo (Editor), Blackwell Publishing, 1998). Briefly, a reaction contains primers, DNA, buffers and a thermostable polymerase enzyme. The reaction is cycled (up to 50 times) through temperature steps of denaturation, hybridization and DNA extension on a thermocycler such as the MJ Research Thermocycler model PTC-96V.

### DNA Analysis

[0401] PCR products can be analyzed using a variety of methods including size differentiation using mass spectrometry, capillary gel electrophoresis and agarose gel electrophoresis. If the PCR amplicons have been designed to contain differential restriction enzyme sites, the DNA in the PCR reaction is purified using DNA-binding columns or precipitation and re-suspended in water, and then restricted using the appropriate restriction enzyme. The restricted DNA can then be run on an agarose gel where DNA is separated by size using electric current. Various alleles of a gene will have different sizes depending on whether they contain restriction sites.

### Example 2

### Identification of Genes and Priority Ranking of Genes

[0402] Significant genes were ranked according to an Empirical Bayes approach (Lonnstedt and Speed, 2002, Statistica Sinica 12: 31-46), based on a comparison of all animals at Day 28 compared to animals on days 0, 2, 4, 7, 9, 11, 14, 17, 21, and 24. The empirical Bayes approach was used to provide a shrinkage estimator of the within groups variance for each gene.

[0403] Individual p values were based on at Test using this shrinkage estimator. The p values of the t test were adjusted using Holms method to maintain strong control of the family wise type I error rate.

[0404] The genes listed in Table 5 were generated from a total of 783 genes that were significant (p<0.05) across the various days. This gene list was trimmed by eliminating those genes that were significant for less than two days and where p>0.001. The remaining genes were then ranked in increasing order of their p value.

[0405] It should be noted that this gene list is not inclusive of the genes that can act as diagnostics for stress (see also the minimally predictive set and gene ontology).

[0406] The genes listed in Table 6 are ranked in order of their t statistic or value—which may be interpreted as a signal-to-noise ratio. The tabulation also displays the log 2 fold change (M value), and the adjusted p values. Genes with a negative t value (and hence a negative M value) are down regulated. Genes with positive t and M values are up-regulated. The priority ranking of genes is based on increasing value of t value for the first day each gene is significant (p<0.001) following stress induction, and for genes that were significant for at least three sampling times.

### Example 3

### Demonstration of Diagnostic Potential to Determine Stress Response

[0407] The diagnostic potential of the entire set of genes was assessed using discriminant analysis (Venables and Ripley, 2002, Modern Applied Statistics in S, Springer) on the principal component scores (Jolliffe, I. T. Principal components analysis, Springer-Verlag, 1986) calculated from gene expression. Comparisons were made between samples taken immediately after the stressor, and at 2, 4, 7, 9, 11, 14, 17, 21, 24 and 28 days after the stressor.

[0408] The entire process was cross-validated. Sensitivity and specificity were calculated for a uniform prior. This may be interpreted as a form of shrinkage regularization, where the estimates are shrunken to lie in a reduced space.

[0409] Cross validated estimates of discriminant function scores were then used to construct an ROC curve (Lloyd C. J., 1998, The use of smoothed ROC curves to summarize and compare diagnostic systems, Journal of the American Statistical Association 93:1356-1364). The ROC curves were based both on empirical cumulative distribution functions, and on kernel density estimates with a smoothing window chosen using Lloyd's method (loc. cit).

[0410] ROC curves for the comparison of each day with Day 28 are shown in FIGS. 1 to 10, respectively.

[0411] Changes in gene expression following transport stress are of sufficient magnitude to produce excellent diagnostic potential.

### Example 4

### Minimally Predictive Gene Sets

[0412] Although a large number of genes has been identified as having diagnostic potential, a much fewer number are generally required for acceptable diagnostic performance.

[0413] Table 7 shows the cross-validated classification success, sensitivity and specificity obtained from a linear discriminant analysis, based on two genes selected from the set of potential diagnostic genes. The pairs presented are those producing the highest prediction success, many other pairs of genes produce acceptable classification success. The identification of alternate pairs of genes would be readily apparent to those skilled in the art. Techniques for identifying pairs include (but are not limited to) forward variable selection (Venables W. N. and Ripley B. D. Modern Applied Statistics in S 4^{th} Edition 2002. Springer), best subsets selection, backwards elimination (Venables W. N. and Ripley B. D., 2002, supra), stepwise selection (Venables W. N. and Ripley B. D., 2002, supra) and stochastic variable elimination (Figuerado M. A. Adaptive Sparseness for Supervised Learning).

[0414] Table 8 shows the cross-validated classification success obtained from a linear discriminant analysis based on three genes selected from the diagnostic set. Only twenty sets of three genes are presented. It will be readily apparent to those of skill in the art that other suitable diagnostic selections based on three stress marker genes can be made.

[0415] Table 9 shows the cross-validated classification success obtained from a linear discriminant analysis based on four genes selected from the diagnostic set. Only twenty sets of four genes are presented. It will be readily apparent to practitioners in the art that other suitable diagnostic selections based on four stress marker genes can be made.

[0416] Table 10 shows the cross-validated classification success obtained from a linear discriminant analysis based on five genes selected from the diagnostic set. Only twenty sets of five genes are presented. It will be readily apparent to practitioners in the art that other suitable diagnostic selections based on five stress marker genes can be made.

[0417] Table 11 shows the cross-validated classification success obtained from a linear discriminant analysis based on six genes selected from the diagnostic set. Only twenty sets of six genes are presented. It will be readily apparent to practitioners in the art that other suitable diagnostic selections based on six stress marker genes can be made.

[0418] Table 12 shows the cross-validated classification success obtained from a linear discriminant analysis based on seven genes selected from the diagnostic set. Only twenty sets of seven genes are presented. It will be readily apparent to practitioners in the art that other suitable diagnostic selections based on seven stress marker genes can be made.

[0419] Table 13 shows the cross-validated classification success obtained from a linear discriminant analysis based on eight genes selected from the diagnostic set. Only twenty sets of eight genes are presented. It will be readily apparent to practitioners in the art that other suitable diagnostic selections based on eight stress marker genes can be made.

[0420] Table 14 shows the cross-validated classification success obtained from a linear discriminant analysis based on nine genes selected from the diagnostic set. Only twenty sets of nine genes are presented. It will be readily apparent to practitioners in the art that other suitable diagnostic selections based on nine stress marker genes can be made.

[0421] Table 15 shows the cross-validated classification success obtained from a linear discriminant analysis based on ten genes selected from the diagnostic set. Only twenty sets of ten genes are presented. It will be readily apparent to practitioners in the art that other suitable diagnostic selections based on ten stress marker genes can be made.

[0422] Table 16 shows the cross-validated classification success obtained from a linear discriminant analysis based on 20 genes selected from the diagnostic set. Only 20 sets of twenty genes are presented. It will be readily apparent to practitioners in the art that other suitable diagnostic selections based on twenty stress marker genes can be made.

### Example 5

### Demonstration of Specificity

[0423] The specificity of a stress gene signature is difficult to define because the test is an assessment rather than a diagnostic.

[0424] Nonetheless, the entire set of “stress genes” were used as a training set against a gene expression database of over 850 GeneChip™. Gene expression results in the database were obtained from samples from horses with various diseases and conditions including; chronic and acute induced EPM, clinical cases of EPM, herpes virus infection, degenerative osteoarthritis, Rhodococcus infection, endotoxemia, laminitis, gastric ulcer syndrome, animals in athletic training and clinically normal animals. The stress status of these animals was not known a priori.

[0425] A stress index score was calculated for each GeneChip™, using the genes in the training set. The score was calculated from a regularized discriminant function, so that large values would be associated with high probability of stress, and the variance of the score should be approximately 1. GeneChip™ were ranked on this score, from the largest to the smallest.

[0426] Specificity was investigated by varying a threshold value for a positive diagnosis. At each value of the threshold, specificity was defined as the proportion of positive results (i.e. GeneChip™ index score greater than the threshold) which were true positives. A threshold value of two (i.e. two standard deviations) was adopted.

[0427] 59 animals from the database that were not part of the induced stress trial were identified as having immune modification associated with stress and were two standard deviations above zero on discriminant function when using four principal components and the entire gene set (3105). Of these 59 animals, 10 were in a laminitis trial, 14 had R. equi infection and nine had gastritis. Thirteen animals were “controls,” and of these, three had been recently transported, two were in a trial, three were not clinically normal and five were foals with exposure to R. equi. Twelve animals deemed to be clinically normal were identified by the signature as stressed. Based on this information, it can be stated that the specificity of the stress signature is over 90% when used against a database of over 850 samples.

[0428] 79 animals from the database that were not part of the induced stress trial were identified as having immune modification associated with stress and were two standard deviations above zero on discriminant function when using four principal components and the unique stress signature genes listed in Table 1. Of these 79 animals, 15 were in a laminitis trial, 8 had R. equi infection and 24 had gastritis. Twenty-one were “controls”, and of these, 12 were in a trial, and three were not clinically normal. Nine animals deemed to be clinically normal were identified by the signature as stressed. Based on this information, it can be stated that the specificity of the stress signature is over 90% when used against a database of over 850 samples.

### Example 7

### Gene Ontology

[0429] Gene sequences were compared against the GenBank database using the BLAST algorithm (Altschul, S. F., Gish, W., Miller, W., Myers, E. W. & Lipman, D. J. (1990) “Basic local alignment search tool.” J. Mol. Biol. 215:403-410), and gene homology and gene ontology searches were performed in order to group genes based on function, metabolic processes or cellular component (using UniProt and GenBank). Table 17 lists and groups the genes based on these criteria and information available at the time. See also Table 1, which contains sequence information for each gene.

[0430] The disclosure of every patent, patent application, and publication cited herein is hereby incorporated herein by reference in its entirety.

[0431] The citation of any reference herein should not be construed as an admission that such reference is available as “Prior Art” to the instant application.

[0432] Throughout the specification the aim has been to describe the preferred embodiments of the invention without limiting the invention to any one embodiment or specific collection of features. Those of skill in the art will therefore appreciate that, in light of the instant disclosure, various modifications and changes can be made in the particular embodiments exemplified without departing from the scope of the present invention. All such modifications and changes are intended to be included within the scope of the appended claims.

Lengthy table referenced here
US20090081243A1-20090326-T00001
Please refer to the end of the specification for access instructions.

TABLE 2

| | | Sequence |
|---|---|---|
| Probe Set Name | PROBE SEQUENCE | Identifier |
| Pleckstrin | | |
| B1960933.V1.3_at | ACTTGAGAGGCTGCGTGGTGACTTC | SEQ ID NO:250 |
| B1960933.V1.3_at | GCCCCTGGGAGCGATTCACTTGAGA | SEQ ID NO:251 |
| B1960933.V1.3_at | GAATTTTCATCTGGCAGGGTTCCGA | SEQ ID NO:252 |
| B1960933.V1.3_at | GAACCTCTTTGAGATCATCACGGCG | SEQ ID NO:253 |
| B1960933.V1.3_at | GAATTCCAGCGATGATGACGTGATT | SEQ ID NO:254 |
| B1960933.V1.3_at | GAAGACCCTGCATATGTGCACTACA | SEQ ID NO:255 |
| B1960933.V1.3_at | GTTCATTATTTCTTGCAAGCGGCCA | SEQ ID NO:256 |
| B1960933.V1.3_at | GGATAAACTCGGTCCAGGGCCTGTC | SEQ ID NO:257 |
| B1960933.V1.3_at | GTGACTTCAGTGGAGGGCAACCCAG | SEQ ID NO:258 |
| B1960933.V1.3_at | GGGCCTGTCCACTTCTGGTGACAAG | SEQ ID NO:259 |
| B1960933.V1.3_at | GGAAGTGAGGGCACACCTGCAGCTC | SEQ ID NO:260 |
| G protein-coupled | | |
| receptor HM74a | | |
| B1961009.V1.3_at | AGACAGGTATTTCCGGGTGGTCCAT | SEQ ID NO:261 |
| B1961009.V1.3_at | AGCATCATCTTCCTCACGGTGGTGG | SEQ ID NO:262 |
| B1961009.V1.3_at | AATCCAGCCGGATTTTCCTGTTCAA | SEQ ID NO:263 |
| B1961009.V1.3_at | AATGGCCTTGCCCTTTGGATTTTCT | SEQ ID NO:264 |
| B1961009.V1.3_at | GAAAAACTGCTGTGTGTTCCGGGAT | SEQ ID NO:265 |
| B1961009.V1.3_at | GTTCCGGGATGACTTCATTGCCAAT | SEQ ID NO:266 |
| B1961009.V1.3_at | GGATCATGCTCTTCATGCTGGCCAT | SEQ ID NO:267 |
| B1961009.V1.3_at | TGGATTTTCTGTTTCCACCTCAAAT | SEQ ID NO:268 |
| B1961009.V1.3_at | TGACTTTCTCTTGATCATCTGCCTA | SEQ ID NO:269 |
| B1961009.V1.3_at | TCCTGTTCAACTTAGCCGTGGCTGA | SEQ ID NO:270 |
| B1961009.V1.3_at | TAGGTGAGGAGCTCCCTAGGACCAG | SEQ ID NO:271 |
| B1961185.V1.3_at | ATCTCCATCTGCTACTTCGAGCAGG | SEQ ID NO:272 |
| B1961185.V1.3_at | AGTGGGTCAAGGTGCACGAGCTCAA | SEQ ID NO:273 |
| B1961185.V1.3_at | CGAGAGTAACCGCATTGTGACCTGC | SEQ ID NO:274 |
| B1961185.V1.3_at | ACAGCTTCCTGGTGGAGCCCATCAG | SEQ ID NO:275 |
| B1961185.V1.3_at | ACAAGTTCGCTGTGGGCAGCGGCTC | SEQ ID NO:276 |
| B1961185.V1.3_at | AACCACGAGGTGCACATCTATGAGA | SEQ ID NO:277 |
| B1961185.V1.3_at | AACGGGCAGGTGACAGGCATCGACT | SEQ ID NO:278 |
| B1961185.V1.3_at | AAGGACCGCACACAGATTGCCATCT | SEQ ID NO:279 |
| B1961185.V1.3_at | GCAACGCCTACGTGTGGACGCTGAA | SEQ ID NO:280 |
| B1961185.V1.3_at | GTGCAAACACATCAAGAAGCCCATT | SEQ ID NO:281 |
| B1961185.V1.3_at | GGACGCTGAAGGGTCACACATGGAA | SEQ ID NO:282 |
| PREDICTED: Homo sapiens | | |
| steroid receptor RNA | | |
| activator 1 (SRA1) | | |
| B1961443.V1.3_at | TGGGAGGCCTTCTCTAATTTGGCTC | SEQ ID NO:283 |
| B1961443.V1.3_at | AGGCTCCATAATCCTGTGGGTTCCC | SEQ ID NO:284 |
| B1961443.V1.3_at | ATGTGATGACATCAGCCGACGCCTG | SEQ ID NO:285 |
| B1961443.V1.3_at | ATGGCTCTGCTGGTGCAAGAGCTTT | SEQ ID NO:286 |
| B1961443.V1.3_at | AGGAGCACCAGACCGTACCAGGCAT | SEQ ID NO:287 |
| B1961443.V1.3_at | AAGAGCTTTCAAGCCACCGTTGGGA | SEQ ID NO:288 |
| B1961443.V1.3_at | AAGAGGAGCCTGTCTTCAGAGGAGA | SEQ ID NO:289 |
| B1961443.V1.3_at | GCATTGGACGATTGCCGTGGCCACA | SEQ ID NO:290 |
| B1961443.V1.3_at | GAAGAGAAATCTACAGCCACAGCTG | SEQ ID NO:291 |
| B1961443.V1.3_at | GGGAAGCTGTCAACGCCTGTAAAGA | SEQ ID NO:292 |
| B1961443.V1.3_at | TTACCACTTTGGAGACTGTCTGCCC | SEQ ID NO:293 |
| HREV107-3 | | |
| B1961494.V1.3_at | AGTGCCCCGCAGCGACCAGGTCAGA | SEQ ID NO:294 |
| B1961494.V1.3_at | CAGCGACCAGGTCAGAGACGCCATC | SEQ ID NO:295 |
| B1961494.V1.3_at | GCCCCGCAGCGACCAGGTCAGAGAC | SEQ ID NO:296 |
| B1961494.V1.3_at | GCAGCGACCAGGTCAGAGACGCCAT | SEQ ID NO:297 |
| B1961494.V1.3_at | GAGTGCCCCGCAGCGACCAGGTCAG | SEQ ID NO:298 |
| B1961494.V1.3_at | GTGCCCCGCAGCGACCAGGTCAGAG | SEQ ID NO:299 |
| B1961494.V1.3_at | TGCCCCGCAGCGACCAGGTCAGAGA | SEQ ID NO:300 |
| B1961512.V1.3_at | AACTCAGAAGACAGAAGTACAGGAA | SEQ ID NO:301 |
| B1961512.V1.3_at | GCGCAGGAAAGGTGATTTGAAGCCT | SEQ ID NO:302 |
| B1961512.V1.3_at | ATAGTAATTGGGAGTGGCAGGATAA | SEQ ID NO:303 |
| B1961512.V1.3_at | ACCTTCATGTTCGTGGCGCAGGAAA | SEQ ID NO:304 |
| B1961512.V1.3_at | AAGATAAGACGCCTCTAGAAGACAG | SEQ ID NO:305 |
| B1961512.V1.3_at | CCTAGTTGGTCTTATGGCATTATTT | SEQ ID NO:306 |
| B1961512.V1.3_at | GACGCCTCTAGAAGACAGAAACTAA | SEQ ID NO:307 |
| B1961512.V1.3_at | GAGACCTTCATGTTCGTGGCGCAGG | SEQ ID NO:308 |
| B1961512.V1.3_at | GTGATTTGAAGCCTAGTTGGTCTTA | SEQ ID NO:309 |
| B1961512.V1.3_at | GGTCTTATGGCATTATTTGCTAAAA | SEQ ID NO:310 |
| B1961512.V1.3_at | TTCAAACCCAAAAGGTAGGAAGCAG | SEQ ID NO:311 |
| B1961539.V1.3_at | ATATCATGGAGGACCTGGATACCAA | SEQ ID NO:312 |
| B1961539.V1.3_at | ATCATCAATGTCTTCCACCAGTACT | SEQ ID NO:313 |
| B1961539.V1.3_at | ACGGCCACAGCCACTAATCTGGAGG | SEQ ID NO:314 |
| B1961539.V1.3_at | CAAGCAGCTGAGTTTCGAGGAGTTC | SEQ ID NO:315 |
| B1961539.V1.3_at | GAGCTGGCGAACTTCCTCAAGAGTA | SEQ ID NO:316 |
| B1961539.V1.3_at | GATGCACGAGCATGACCAAGGCCAC | SEQ ID NO:317 |
| B1961539.V1.3_at | GAGGAGTTCATCATCCTGGTGGCCA | SEQ ID NO:318 |
| B1961539.V1.3_at | GGAACTGTCCCAGATGGAGCGCGAC | SEQ ID NO:319 |
| B1961539.V1.3_at | GGAGAGTGGCCATGGTCACAGCCAT | SEQ ID NO:320 |
| B1961539.V1.3_at | GGAGCGCGACATAGAGACCATCATC | SEQ ID NO:321 |
| B1961539.V1.3_at | TGACGCATGCCTCCCATGAGAAGAT | SEQ ID NO:322 |
| ILT11A mRNA for | | |
| immunoglobulin-like | | |
| transcript 11 protein | | |
| B1961620.V1.3_at | AGGACGTGACCTACGCCCAGGTGAA | SEQ ID NO:323 |
| B1961620.V1.3_at | AGGGACCCCAGAAGACATAGGAGCT | SEQ ID NO:324 |
| B1961620.V1.3_at | AGGTGAACCACTTGACCCTCAGAGG | SEQ ID NO:325 |
| B1961620.V1.3_at | AGTGGTACGCTGCTATGGCCATCCA | SEQ ID NO:326 |
| B1961620.V1.3_at | AGCAGAGCCCAGTGGTACGCTGCTA | SEQ ID NO:327 |
| B1961620.V1.3_at | CATAGGAGCTGCCTCCAGAGGACAC | SEQ ID NO:328 |
| B1961620.V1.3_at | GAGACTGCAGGGACCCCAGAAGACA | SEQ ID NO:329 |
| B1961620.V1.3_at | GATGCCACCCTCCATGGAGGGAGAC | SEQ ID NO:330 |
| B1961620.V1.3_at | GTATGCACAGGCTGCTATATCTGAA | SEQ ID NO:331 |
| B1961620.V1.3_at | TGGCCATCCACTAGCCCAGGAAGGA | SEQ ID NO:332 |
| B1961620.V1.3_at | TAGCCCAGGAAGGACCCGGATGCCA | SEQ ID NO:333 |
| Mn-SOD mRNA for | | |
| manganese superoxide | | |
| dismutase | | |
| B1961637.V1.3_at | AGATTGTTGCCTGTCCTAACCAGGA | SEQ ID NO:334 |
| B1961637.V1.3_at | GCATTATCGTTACACCGAGTGCATT | SEQ ID NO:335 |
| B1961637.V1.3_at | CGTGACTTTGGTTCCTTCGACAAAT | SEQ ID NO:336 |
| B1961637.V1.3_at | GCAGCCTGCACTCAAGTTCAATGGT | SEQ ID NO:337 |
| B1961637.V1.3_at | GAAGTTGACTGCTGTATCGGCTGGT | SEQ ID NO:338 |
| B1961637.V1.3_at | TAAGGACCAGGGACGCCTCCAGATT | SEQ ID NO:339 |
| B1961637.V1.3_at | GGAGGCCATATCAATCATACCATTT | SEQ ID NO:340 |
| B1961637.V1.3_at | GGAACAACAGGTCTTATTCCCCTGC | SEQ ID NO:341 |
| B1961637.V1.3_at | GGAGCACGCTTATTACCTTCAGTAT | SEQ ID NO:342 |
| B1961637.V1.3_at | TTGCTGGACGCCATCAAACGTGACT | SEQ ID NO:343 |
| B1961637.V1.3_at | TTTTCTGGACAAACCTGAGCCCCAA | SEQ ID NO:344 |
| B1961648.V1.3_at | ATATGAGGAGCTGAACCTGCCGGCT | SEQ ID NO:345 |
| B1961648.V1.3_at | GGGCTCATCGAGCAGTACGCTACGC | SEQ ID NO:346 |
| B1961648.V1.3_at | AGGAAGACAGTTACAGCCGCCTTAT | SEQ ID NO:347 |
| B1961648.V1.3_at | AACAGCGCCAGATCCTGCAGGAGAA | SEQ ID NO:348 |
| B1961648.V1.3_at | CAAGACAGCTTTCTATTCCTTCTAC | SEQ ID NO:349 |
| B1961648.V1.3_at | CTGGCTGGTGGTTCAGTGTCTGCAA | SEQ ID NO:350 |
| B1961648.V1.3_at | GACGGGCAAGATTGGCACTGACATC | SEQ ID NO:351 |
| B1961648.V1.3_at | GGGCGAGTTCTTTCAGATTCAGGAC | SEQ ID NO:352 |
| B1961648.V1.3_at | GGACGATTACCTTGATCTCTTTGGG | SEQ ID NO:353 |
| B1961648.V1.3_at | TGCCGGCTGTGTTCCTGCAGTATGA | SEQ ID NO:354 |
| B1961648.V1.3_at | TTCCTGTAGCTGCTGCCATGTACAT | SEQ ID NO:355 |
| NAD synthetase 1 | | |
| B1961671.V1.3_at | AGAGCTGGAGCCCTTGACCAACGGA | SEQ ID NO:356 |
| B1961671.V1.3_at | AGAAAACCAGGTTCTCCAGCTCGAG | SEQ ID NO:357 |
| B1961671.V1.3_at | ACGGCGTGGTCAGCAAGTCTTGTTT | SEQ ID NO:358 |
| B1961671.V1.3_at | AAGACCGGGCCCTATAGCATGTTCT | SEQ ID NO:359 |
| B1961671.V1.3_at | GAAGTACTCCGCGAACAGACACAAG | SEQ ID NO:360 |
| B1961671.V1.3_at | GACAACAGGTTCGATCTGCGGCCAT | SEQ ID NO:361 |
| B1961671.V1.3_at | GACCAACGGACAGGTGTCGCAGACT | SEQ ID NO:362 |
| B1961671.V1.3_at | TGAAGCGGTTTTTCTCGAAGTACTC | SEQ ID NO:363 |
| B1961671.V1.3_at | GTGGCAGTTCCGGTGCATAGAAAAC | SEQ ID NO:364 |
| B1961671.V1.3_at | GGATGACGTACGCAGAGCTCTCCGT | SEQ ID NO:365 |
| B1961671.V1.3_at | TATAGCATGTTCTGCAGACTCCTCA | SEQ ID NO:366 |
| Formin homology 2 | | |
| domain containing 1 | | |
| B1961682.V1.3_at | ATATGGGCCCCGGTATGCAGTGCAA | SEQ ID NO:367 |
| B1961682.V1.3_at | CGTGGCAACCGCAAGTCTTTGAGGC | SEQ ID NO:368 |
| B1961682.V1.3_at | AGAGGCATGGTCCAGAACAGCTCCC | SEQ ID NO:369 |
| B1961682.V1.3_at | AGAAGAATCCCCAGGCTCCAGTTTA | SEQ ID NO:370 |
| B1961682.V1.3_at | AAGCCTGAGGACACCACACATGGTC | SEQ ID NO:371 |
| B1961682.V1.3_at | TCCAGTTTACCCAGTGACACTTCAG | SEQ ID NO:372 |
| B1961682.V1.3_at | GCTGCCTCCAGGACATCTATATGGG | SEQ ID NO:373 |
| B1961682.V1.3_at | GCATGAAGATTCTGCTCACCAGCAA | SEQ ID NO:374 |
| B1961682.V1.3_at | GACTGAGCAAGGGTTCTGACCTGGA | SEQ ID NO:375 |
| B1961682.V1.3_at | GAGATCATGGACCTGCTAGTGCAGT | SEQ ID NO:376 |
| B1961682.V1.3_at | TTAGCTGCTCGAGAACGCAAGCGTT | SEQ ID NO:377 |
| No Homology | | |
| B1961711.V1.3_at | CCGTTCGCGTGCACCCAGGGAGGAC | SEQ ID NO:378 |
| B1961711.V1.3_at | GTCGCCGTGGTCACCCACAGGAAGG | SEQ ID NO:379 |
| B1961711.V1.3_at | CAGCCTGGGTTTTCTCGGGCGGCTC | SEQ ID NO:380 |
| B1961711.V1.3_at | CATTTTCTTCTGGTCGCCGTGGTCA | SEQ ID NO:381 |
| B1961711.V1.3_at | CAGGTCTCAGCCTGTGAGGACTGCG | SEQ ID NO:382 |
| B1961711.V1.3_at | GACTGCGGCGAGTCTGGAGACCCCA | SEQ ID NO:383 |
| B1961711.V1.3_at | GAGGGCCATCTGCTGACAGAGCAAC | SEQ ID NO:384 |
| B1961711.V1.3_at | GTGTGGACCCACGAGGGCCATCTGC | SEQ ID NO:385 |
| B1961711.V1.3_at | GTGGGCTCTGTCTGGTTCACAGAGC | SEQ ID NO:386 |
| B1961711.V1.3_at | TGCACCCAGGGAGGACTCGGAGTCC | SEQ ID NO:387 |
| B1961711.V1.3_at | TCTTCGGGACTGTGTGGACCCACGA | SEQ ID NO:388 |
| Tumor necrosis factor | | |
| inducible (TSG-6) mRNA | | |
| fragment, adhesion | | |
| receptor CD44 putative | | |
| CDS | | |
| B1961885.V1.3_at | AGGTTGCTTGGCTGACTATGTTGAA | SEQ ID NO:389 |
| B1961885.V1.3_at | ACTCAAGTATGGTCAGCGTATTCAC | SEQ ID NO:390 |
| B1961885.V1.3_at | AATGCGGTGGCATCTTTACAGATAC | SEQ ID NO:391 |
| B1961885.V1.3_at | CTAAGCGATGCTTCGGTGACCGCAG | SEQ ID NO:392 |
| B1961885.V1.3_at | GCGTATTCACCTGAGTTTTCTGGAC | SEQ ID NO:393 |
| B1961885.V1.3_at | GAACCCCTTTGATCTCAGTTTTGTA | SEQ ID NO:394 |
| B1961885.V1.3_at | GTGACCGCAGGAGGTTTCCAAATCA | SEQ ID NO:395 |
| B1961885.V1.3_at | TTTTAAATCTCCAGGCTTCCCAAAT | SEQ ID NO:396 |
| B1961885.V1.3_at | TAACCAAGTCTGCTACTGGCACATC | SEQ ID NO:397 |
| B1961885.V1.3_at | TACAAGCACTACTTCTACGGGAAAT | SEQ ID NO:398 |
| B1961885.V1.3_at | TATGGTTGTCTCTTTTGGAACCCCT | SEQ ID NO:399 |
| Fibroblast mRNA for | | |
| aldolase A | | |
| B1961941.V1.3_at | AGGGCTTTAGGCTGTTCTTTCCCAT | SEQ ID NO:400 |
| B1961941.V1.3_at | AGGAGGAGGCATCCATCAACCTCAA | SEQ ID NO:401 |
| B1961941.V1.3_at | AGTGGAGGTATTCTAAGGCTGCCCC | SEQ ID NO:402 |
| B1961941.V1.3_at | AAATACACCCCAAGTGGTCACGCTG | SEQ ID NO:403 |
| B1961941.V1.3_at | TGAAGCCCAATATGGTAACCCCAGG | SEQ ID NO:404 |
| B1961941.V1.3_at | GATTGCCATGGCAACTGTCACGGCA | SEQ ID NO:405 |
| B1961941.V1.3_at | GTCTGTGGTATTGTCTGTGTATGCT | SEQ ID NO:406 |
| B1961941.V1.3_at | GGAATATGTCAAGCGAGCCCTGGCC | SEQ ID NO:407 |
| B1961941.V1.3_at | TGGGATCACCTTCCTATCTGGAGGC | SEQ ID NO:408 |
| B1961941.V1.3_at | TTGCCTCCCTGGTGACATTGGTCTG | SEQ ID NO:409 |
| B1961941.V1.3_at | TTCATCTCTAACCATGCCTACTAAG | SEQ ID NO:410 |
| High-risk human | | |
| papilloma viruses E6 | | |
| oncoproteins targeted | | |
| protein E6TP1 beta | | |
| mRNA | | |
| BM734457.V1.3_at | ATGATGACTGCACCCCACGGAGGAG | SEQ ID NO:411 |
| BM734457.V1.3_at | AGGCCCTACGGCTATGCCTGGCAGG | SEQ ID NO:412 |
| BM734457.V1.3_at | AGGAGTTGCTCTGAAACCTACCGCA | SEQ ID NO:413 |
| BM734457.V1.3_at | AGATCTGCAAGGTGGCAGTGGCCAC | SEQ ID NO:414 |
| BM734457.V1.3_at | ACCCCACGGAGGAGTTGCTCTGAAA | SEQ ID NO:415 |
| BM734457.V1.3_at | CACGGTGAAGGTGGTCATTATCCCC | SEQ ID NO:416 |
| BM734457.V1.3_at | AACCTACCGCATGCCAGTGATGGAA | SEQ ID NO:417 |
| BM734457.V1.3_at | CTGCTGAGAACATCCGTCACGGTGA | SEQ ID NO:418 |
| BM734457.V1.3_at | GATTGATCTGCTGAGAACATCCGTC | SEQ ID NO:419 |
| BM734457.V1.3_at | GGCAGTGGCCACTCTGAGCCATGAG | SEQ ID NO:420 |
| BM734457.V1.3_at | TGAGCCATGAGCAGATGATTGATCT | SEQ ID NO:421 |
| No homology | | |
| BM734531.V1.3_at | ACCACTTCATGTTCTCTACAGAGCT | SEQ ID NO:422 |
| BM734531.V1.3_at | ACAGAGCTGTCCAGAGCCGAGGCTG | SEQ ID NO:423 |
| BM734531.V1.3_at | AAACGAGTCCGAGGGCACAGCCAGG | SEQ ID NO:424 |
| BM734531.V1.3_at | CGTTGCCCGCTGTTGGTCATGACAA | SEQ ID NO:425 |
| BM734531.V1.3_at | GAGTCTCTGTCAGGATCCTTTTGAA | SEQ ID NO:426 |
| BM734531.V1.3_at | GAGTCACCCAAGGAACTTATGCAGA | SEQ ID NO:427 |
| BM734531.V1.3_at | GTCCTGTGGCTTTTGTGTGTCTCTC | SEQ ID NO:428 |
| BM734531.V1.3_at | GGCCTTGCTTGAGAGAGGTCCATCC | SEQ ID NO:429 |
| BM734531.V1.3_at | GGTCACTTAGCAGCGACTTCTTGGA | SEQ ID NO:430 |
| BM734531.V1.3_at | GGAGCCAGGTGTCTGCATTTGAACA | SEQ ID NO:431 |
| BM734531.V1.3_at | TTATGCAGATGCCATGTCCTCACTC | SEQ ID NO:432 |
| No homology | | |
| BM734654.V1.3_at | ACCTAGACGACCTCTCGGGATTGAC | SEQ ID NO:433 |
| BM734654.V1.3_at | CGATTCCGTTATGCGGTCCAAGCAA | SEQ ID NO:434 |
| BM734654.V1.3_at | TGAACGGGACCAGCCAAACGACGGG | SEQ ID NO:435 |
| BM734654.V1.3_at | AGAACTTCTCATGCTTCATCTACAT | SEQ ID NO:436 |
| BM734654.V1.3_at | GACCGTGATGGTCAACACCAGCCAA | SEQ ID NO:437 |
| BM734654.V1.3_at | GACGACGTCCAGTATTTCCTGTATA | SEQ ID NO:438 |
| BM734654.V1.3_at | GGGATCCAGTTCTTCGATTCCGTTA | SEQ ID NO:439 |
| BM734654.V1.3_at | GGAATGTCCCCGTTACATGAGCGAC | SEQ ID NO:440 |
| BM734654.V1.3_at | TCTACATCGTGCACTTCATGATCTG | SEQ ID NO:441 |
| BM734654.V1.3_at | TTTCGGAGAAGCTCGTCTACACCAA | SEQ ID NO:442 |
| BM734654.V1.3_at | TTGACCTCTTACAATTACTTCGTGG | SEQ ID NO:443 |
| No homology | | |
| BM734719.V1.3_at | ACGCCAATGGGTCAAACTAACTCTG | SEQ ID NO:444 |
| BM734719.V1.3_at | AGAAGTCCTCTCTGAGACTCAAGGG | SEQ ID NO:445 |
| BM734719.V1.3_at | AAAGCCCATGAGCTGCTTCTTTGTT | SEQ ID NO:446 |
| BM734719.V1.3_at | AAAAATCTCTCATCCTATTCTGCTT | SEQ ID NO:447 |
| BM734719.V1.3_at | AAGCCTTCCTAAAAGCACACTTGCC | SEQ ID NO:448 |
| BM734719.V1.3_at | AAGGGCTAAGGCAAGGTCTTCCAGA | SEQ ID NO:449 |
| BM734719.V1.3_at | CAAGAAATGACAGCCTCCAAGCCTT | SEQ ID NO:450 |
| BM734719.V1.3_at | GAAGCTTCTTCCCACCTAGAAAGAA | SEQ ID NO:451 |
| BM734719.V1.3_at | GGTGACAACGCTGGCTGCTGAAAGC | SEQ ID NO:452 |
| BM734719.V1.3_at | TTTCCACTGTCGTCAGAGCCAACAA | SEQ ID NO:453 |
| BM734719.V1.3_at | TTCTTTGTTCTCTGTCACGGGACAA | SEQ ID NO:454 |
| No homology | | |
| BM734722.V1.3_at | CGGGCGACTCGCAGAATCAATACAT | SEQ ID NO:455 |
| BM734722.V1.3_at | ACAGAGCCCCGGTCAGCGGGTGAAA | SEQ ID NO:456 |
| BM734722.V1.3_at | AACTGAACGATAACCATCCGACCGA | SEQ ID NO:457 |
| BM734722.V1.3_at | AATCAATACATTTTCCCGAGTCTGG | SEQ ID NO:458 |
| BM734722.V1.3_at | TCGGCTGCCTGGTGAAGAGGTTCCT | SEQ ID NO:459 |
| BM734722.V1.3_at | GCGTTTCTGCAGCTATTTTTCTACT | SEQ ID NO:460 |
| BM734722.V1.3_at | GGTCCCGCGCATCAAAGACAAACTG | SEQ ID NO:461 |
| BM734722.V1.3_at | GCGACTTCCAGTACGAGCTGGTCAT | SEQ ID NO:462 |
| BM734722.V1.3_at | GAAGAGGTTCCTCCGGAGACACAGT | SEQ ID NO:463 |
| BM734722.V1.3_at | GGAGACACAGTCTGTTCCAGCCGGT | SEQ ID NO:464 |
| BM734722.V1.3_at | TGAAGTTTGGCCAAGAGGCTTCCCG | SEQ ID NO:465 |
| Triggering receptor | | |
| expressed on myeloid | | |
| cells 1, transcript | | |
| variant 2 | | |
| BM734862.V1.3_at | ATCTACATCCATCTGGCAGTTGTGC | SEQ ID NO:466 |
| BM734862.V1.3_at | ATGAGGATGACCTCTGATCTCCATC | SEQ ID NO:467 |
| BM734862.V1.3_at | AGCATTGTCATTCCTGTGGCGTGCG | SEQ ID NO:468 |
| BM734862.V1.3_at | ACAAAGGTTATTTCTGAGGCTCAGG | SEQ ID NO:469 |
| BM734862.V1.3_at | CTCGTGACTAAGAGCCTGGTCCTTA | SEQ ID NO:470 |
| BM734862.V1.3_at | CCCTCATTTCACTGATGACCGTGGG | SEQ ID NO:471 |
| BM734862.V1.3_at | GAAGTCATTTGGATCCTAGGCCCAT | SEQ ID NO:472 |
| BM734862.V1.3_at | TGGCGTGCGCACTCGTGACTAAGAG | SEQ ID NO:473 |
| BM734862.V1.3_at | GGCAGCGACATGAGTTGGATCCGTT | SEQ ID NO:474 |
| BM734862.V1.3_at | TAAAAGAGCAGACACGGCCCCAAAC | SEQ ID NO:475 |
| BM734862.V1.3_at | TTACTGTCCTGTTTGCTGTCACACA | SEQ ID NO:476 |
| Nuclear receptor | | |
| binding factor 1 | | |
| BM734865.V1.3_at | ACCACAGTCCAGAGCAGTTCCAGGG | SEQ ID NO:477 |
| BM734865.V1.3_at | AGGACTACCAGCGTGCCTTGGAAAC | SEQ ID NO:478 |
| BM734865.V1.3_at | AAGGCCAGAGGAGCCAGAGCCAAGT | SEQ ID NO:479 |
| BM734865.V1.3_at | CAAGCAGATTCTCACCATGGGATAA | SEQ ID NO:480 |
| BM734865.V1.3_at | GATCAGCAGGACTGGTTTCGGGCCC | SEQ ID NO:481 |
| BM734865.V1.3_at | GAAACTGCGATGCAGCCCTTCGTGT | SEQ ID NO:482 |
| BM734865.V1.3_at | GAAGCCAGCCAAGGCTTTTCCCAGG | SEQ ID NO:483 |
| BM734865.V1.3_at | GGCTTTTGGTTGTCCCAGTGGAAGA | SEQ ID NO:484 |
| BM734865.V1.3_at | TGATCCTCACGCTGTGCGATCTCAT | SEQ ID NO:485 |
| BM734865.V1.3_at | TCACTGTCACTTCCAACCAGAAGAA | SEQ ID NO:486 |
| BM734865.V1.3_at | TTCGTGTCTTCCAAGCAGATTCTCA | SEQ ID NO:487 |
| Equus caballus | | |
| lipopolysaccharide | | |
| receptor (CD14) mRNA, | | |
| member 6 variant | | |
| BM734889.V1.3_at | AGGAATCCCTATCTGGACCCTGAAG | SEQ ID NO:488 |
| BM734889.V1.3_at | AGCAAGACCAGAACTCCGGCGTGGT | SEQ ID NO:489 |
| BM734889.V1.3_at | AGCGCACTGAGTTCTCTCAACTTGT | SEQ ID NO:490 |
| BM734889.V1.3_at | AACAGGCTCAACAAGGCGCCGCGAG | SEQ ID NO:491 |
| BM734889.V1.3_at | CAACTTGTCCTTCGCTGGGCTGGAG | SEQ ID NO:492 |
| BM734889.V1.3_at | GCCTAAAGGACTACCGGGCAAGCTT | SEQ ID NO:493 |
| BM734889.V1.3_at | GCCTCATTAGGACGTCTTAACCAAC | SEQ ID NO:494 |
| BM734889.V1.3_at | GCTGCCCGTGGTGAGTAATCTGATA | SEQ ID NO:495 |
| BM734889.V1.3_at | GAATTGACTCAGATTGCCCTGGCTC | SEQ ID NO:496 |
| BM734889.V1.3_at | GACCCTGAAGCGTCCAAGCAGCAAG | SEQ ID NO:497 |
| BM734889.V1.3_at | TTAGCGTGCTTGATCTCAGCTGCAA | SEQ ID NO:498 |
| COP9 constitutive | | |
| photomorphogenic | | |
| homolog subunit 7A | | |
| BM735102.V1.3_at | AGGAACAGGTGAGCCGTGCCAACCA | SEQ ID NO:499 |
| BM735102.V1.3_at | AACTGAAGGGACTGTCGTCTCTTTC | SEQ ID NO:500 |
| BM735102.V1.3_at | AATCAGCGGCTGGAGGTTGACTACA | SEQ ID NO:501 |
| BM735102.V1.3_at | GCATAGATCACACCTTCTCTAGGGA | SEQ ID NO:502 |
| BM735102.V1.3_at | GACTACAGCATTGGGCGGGACATCC | SEQ ID NO:503 |
| BM735102.V1.3_at | GTTACAACAGCAGCAGCAGCCGCAG | SEQ ID NO:504 |
| BM735102.V1.3_at | GGACCCTGAGCAACACCTGACTGAG | SEQ ID NO:505 |
| BM735102.V1.3_at | TAATCCTAGGTTCATGACCCTTCAC | SEQ ID NO:506 |
| BM735102.V1.3_at | TGAGGGAACCAGCTCCTGGCACTAA | SEQ ID NO:507 |
| BM735102.V1.3_at | TGCCCGAACCCTGCAAGAGTGGTGT | SEQ ID NO:508 |
| BM735102.V1.3_at | TTTAGGAGTCCTCAGAGAGCCTTCC | SEQ ID NO:509 |
| No homology | | |
| BM735166.V1.3_at | ATGGTCGCCAACTGGAACGTCTGGT | SEQ ID NO:510 |
| BM735166.V1.3_at | AGGCAGGATGCCCAGTGGCCAATAC | SEQ ID NO:511 |
| BM735166.V1.3_at | AGGGCACCCAGCATGGTTGAGTCTG | SEQ ID NO:512 |
| BM735166.V1.3_at | AGTGCAGGTTGCCTGTGGCATCCAT | SEQ ID NO:513 |
| BM735166.V1.3_at | AGCTCAGGGCCTTGTAGTGCAGGTT | SEQ ID NO:514 |
| BM735166.V1.3_at | CATGTTTATTATTACCCCGTGGCGG | SEQ ID NO:515 |
| BM735166.V1.3_at | CTGTGGGTTCAGGTTCATGTTTATT | SEQ ID NO:516 |
| BM735166.V1.3_at | GAAGGCCTTCCTTGAAGGAGCCCAT | SEQ ID NO:517 |
| BM735166.V1.3_at | GGAGGAACCCACAGGCAGATGCTCA | SEQ ID NO:518 |
| BM735166.V1.3_at | TGTGCGGACAAGCAGCCACTGATCA | SEQ ID NO:519 |
| BM735166.V1.3_at | TCAACCTCTGCTGACCACTGAGTGA | SEQ ID NO:520 |
| TAP2E | | |
| BM735167.V1.3_at | AGGCTCTGCAGGACTGGATATCCCG | SEQ ID NO:521 |
| BM735167.V1.3_at | ATGGCTGTCTTCATGACCTGGAGTA | SEQ ID NO:522 |
| BM735167.V1.3_at | GCTCACAGGCTGCAGACGGTTCAGA | SEQ ID NO:523 |
| BM735167.V1.3_at | GAACGGTGCTGGTGATCGCTCACAG | SEQ ID NO:524 |
| BM735167.V1.3_at | GATTTGGACCTTGTGTGCTTTCATT | SEQ ID NO:525 |
| BM735167.V1.3_at | GTGTCCATGAACCTTATTTCCTTGA | SEQ ID NO:526 |
| BM735167.V1.3_at | GGAGTAGCTCCTGCTTTGAGTTTCC | SEQ ID NO:527 |
| BM735167.V1.3_at | TGGACGTCCAGTGTGAGCAGGCTCT | SEQ ID NO:528 |
| BM735167.V1.3_at | TGGATCATGCCCAGCTCATGGAGGG | SEQ ID NO:529 |
| BM735167.V1.3_at | TGGATGAAGCCACCAGTGCCCTGGA | SEQ ID NO:530 |
| BM735167.V1.3_at | TTCAGAACGCTGACCAGATCCTGGT | SEQ ID NO:531 |
| Ferritin light chain | | |
| BM735286.V1.3_at | AGGAGCCTCCGGAGTCCAGCGGCCT | SEQ ID NO:532 |
| BM735286.V1.3_at | AGCTTTTTAACTAGCCTGGAGCCTT | SEQ ID NO:533 |
| BM735286.V1.3_at | CGTCAGAGCTTCTGCCTGAGCCTCT | SEQ ID NO:534 |
| BM735286.V1.3_at | CTGCAGCCACTAGAGATAGCTTTTT | SEQ ID NO:535 |
| BM735286.V1.3_at | CTCCGGAGTCCAGCGGCCTTTGAGG | SEQ ID NO:536 |
| BM735286.V1.3_at | CTGGCGTCAGAGCTTCTGCCTGAGC | SEQ ID NO:537 |
| BM735286.V1.3_at | GAGATAGCTTTTTAACTAGCCTGGA | SEQ ID NO:538 |
| BM735286.V1.3_at | TTTGGTATCCCCCTGGCGTCAGAGC | SEQ ID NO:539 |
| BM735286.V1.3_at | TCCCTGCAGCCACTAGAGATAGCTT | SEQ ID NO:540 |
| BM735286.V1.3_at | TTTTAACTAGCCTGGAGCCTTCTGC | SEQ ID NO:541 |
| BM735286.V1.3_at | TAACTAGCCTGGAGCCTTCTGCCCA | SEQ ID NO:542 |
| BM735286.V1.3_s_at | ATGAAAGCCGCCATTGTCCTGGAGA | SEQ ID NO:543 |
| BM735286.V1.3_s_at | ATTGTCCTGGAGAAGAGCCTGAACC | SEQ ID NO:544 |
| BM735286.V1.3_s_at | ATCCAGAGGCTCGTTGGCTCCCAAG | SEQ ID NO:545 |
| BM735286.V1.3_s_at | ATCTCTGTGACTTCTTGGAGAGCCA | SEQ ID NO:546 |
| BM735286.V1.3_s_at | GATGGGCGACCATCTGACCAACATC | SEQ ID NO:547 |
| BM735286.V1.3_s_at | GGGCTGGGCGAGTATCTCTTTGAAA | SEQ ID NO:548 |
| BM735286.V1.3_s_at | GGGTACAACCCTGGATGCCATGAAA | SEQ ID NO:549 |
| BM735286.V1.3_s_at | TGGAGAGCCACTTCCTAGACGAGGA | SEQ ID NO:550 |
| BM735286.V1.3_s_at | TCTTTGAAAGGCTCACCCTCAAGCA | SEQ ID NO:551 |
| BM735286.V1.3_s_at | TGAACCAGGCCCTTTTGGATCTGCA | SEQ ID NO:552 |
| BM735286.V1.3_s_at | TTGGATCTGCATGCCCTGGGTTCTG | SEQ ID NO:553 |
| No homology | | |
| BM735352.V1.3_at | ATCAGACTGCACTGCCTGCGGGAGG | SEQ ID NO:554 |
| BM735352.V1.3_at | AGCAGTCAAACCAAAGCATTCCATT | SEQ ID NO:555 |
| BM735352.V1.3_at | GTTATGGCCTAATGCCCACTTTTGT | SEQ ID NO:556 |
| BM735352.V1.3_at | GACGGAGCAAGCTCTTGCCATCAGA | SEQ ID NO:557 |
| BM735352.V1.3_at | GACCCAGGGAGAGAACGTCGCTGCT | SEQ ID NO:558 |
| BM735352.V1.3_at | GTCTGTGTTCAAGTACCTCACGGGA | SEQ ID NO:559 |
| BM735352.V1.3_at | GTCGCTGCTGTATACTGTAACGTCT | SEQ ID NO:560 |
| BM735352.V1.3_at | GGGACGCTCCAGATATTTGAATCTC | SEQ ID NO:561 |
| BM735352.V1.3_at | TGATCCTCCTCCTGCGCAGAATAGA | SEQ ID NO:562 |
| BM735352.V1.3_at | TGCTCACACGTAACAGTCTGGTGGG | SEQ ID NO:563 |
| BM735352.V1.3_at | TCTCTATTAACTTACTGCTCACACG | SEQ ID NO:564 |
| No homology | | |
| BM735409.V1.3_at | ATCTTGCACCTTCTTCAGGATTTTA | SEQ ID NO:565 |
| BM735409.V1.3_at | ACCTGCCTGGGCTTCTGGGCCTGTG | SEQ ID NO:566 |
| BM735409.V1.3_at | ACAGAGGGAGCCAGCAGCTGTCCCC | SEQ ID NO:567 |
| BM735409.V1.3_at | ACACACTTTGCGTATCTGAGCGCGC | SEQ ID NO:568 |
| BM735409.V1.3_at | AAAGCAGTACCTGGTGGCCGTGTGC | SEQ ID NO:569 |
| BM735409.V1.3_at | GAAGTCAGAAGCCAAGCTTTCTCCC | SEQ ID NO:570 |
| BM735409.V1.3_at | GTACCTCCTCCTCTGGAGGTGCTGG | SEQ ID NO:571 |
| BM735409.V1.3_at | GGAAGCGCTGGAGCCACCCCGTGAA | SEQ ID NO:572 |
| BM735409.V1.3_at | TGGCCTGGGCTCTGTCTACAGCCAC | SEQ ID NO:573 |
| BM735409.V1.3_at | TCGCACTGGGTCTTATCTTGCACCT | SEQ ID NO:574 |
| BM735409.V1.3_at | TCTGTGGGCCGCACGTACACACACA | SEQ ID NO:575 |
| JKTBP1 (alternative | | |
| splicing). | | |
| BM735419.V1.3_at | ACCGAATCCAGGTGTGGCACGCGGA | SEQ ID NO:576 |
| BM735419.V1.3_at | AGAAGGCGCCTGACTTCGTGTTCTA | SEQ ID NO:577 |
| BM735419.V1.3_at | ACGAGCTGTACATGCGCCGCAGGAA | SEQ ID NO:578 |
| BM735419.V1.3_at | AAAGATTGGCTTCCCGTGGAGTGAA | SEQ ID NO:579 |
| BM735419.V1.3_at | ACAAGTCTGGGTACCTAGGCTCTGA | SEQ ID NO:580 |
| BM735419.V1.3_at | AACAAGCGGATCCTGCAGCTGTGCA | SEQ ID NO:581 |
| BM735419.V1.3_at | CTACGCTGTGCAGGCCAAGTTTGGA | SEQ ID NO:582 |
| BM735419.V1.3_at | GAACAGACCTTTGGCTTGGAGTCGA | SEQ ID NO:583 |
| BM735419.V1.3_at | GATGCCCTTGGACTGAATATTTATG | SEQ ID NO:584 |
| BM735419.V1.3_at | GTATCTGAAGATTGCCCAGGACCTG | SEQ ID NO:585 |
| BM735419.V1.3_at | TGTGCATGGGCAACCACGAGCTGTA | SEQ ID NO:586 |
| WD repeat domain 1 | | |
| BM735441.V1.3_at | ATGATGGTGTACGTCTGGACCCTCA | SEQ ID NO:587 |
| BM735441.V1.3_at | ATGGTCACCATGCAAAGATCGTCTG | SEQ ID NO:588 |
| BM735441.V1.3_at | AGTGGTCACAGTCTTAAGCGTTGCT | SEQ ID NO:589 |
| BM735441.V1.3_at | AGATCTGTACACGTCCTTCTGAAAG | SEQ ID NO:590 |
| BM735441.V1.3_at | AGAACGCGGCGTTTCTCTAAATCCT | SEQ ID NO:591 |
| BM735441.V1.3_at | ACGGGCCGCATCAGGGACGAGATTC | SEQ ID NO:592 |
| BM735441.V1.3_at | GACAACGAGCATTTTGCCTCTGGCG | SEQ ID NO:593 |
| BM735441.V1.3_at | GTTGCTGACGGCTACTCGGAGAACA | SEQ ID NO:594 |
| BM735441.V1.3_at | GTCAAGATCCAAGATGCACACCGCT | SEQ ID NO:595 |
| BM735441.V1.3_at | TGGACGAGCACACGTTGGTCACGAC | SEQ ID NO:596 |
| BM735441.V1.3_at | TCGTCTCTCTACAGGGTGTTCAGAT | SEQ ID NO:597 |
| Lymphocyte surface | | |
| antigen precursor | | |
| CD44 | | |
| BM735450.V1.3_at | ATTCTCGCAGTTTGCATTGCTGTCA | SEQ ID NO:598 |
| BM735450.V1.3_at | AGAGAAGACTCCCACTACCAAAGAC | SEQ ID NO:599 |
| BM735450.V1.3_at | AGAGCAGTCCCTGGGTGTCTGACAG | SEQ ID NO:600 |
| BM735450.V1.3_at | AGAATGGCTGATCATCTTGGCGTCC | SEQ ID NO:6O1 |
| BM735450.V1.3_at | ACCTGCACCTTGACCTTGGGAAGAA | SEQ ID NO:602 |
| BM735450.V1.3_at | CGACGAGACACGGAACCTGCAGAAT | SEQ ID NO:603 |
| BM735450.V1.3_at | GACCAGTTTATGACAGCCGACGAGA | SEQ ID NO:604 |
| BM735450.V1.3_at | GACCACCCACGGATCTGAAACAAGT | SEQ ID NO:605 |
| BM735450.V1.3_at | GAGTCGTCAGAGACCCAAGACCAGT | SEQ ID NO:606 |
| BM735450.V1.3_at | GGGTCCCATACGGAGACCTCAAATT | SEQ ID NO:607 |
| BM735450.V1.3_at | TGTGATGTGCTACTGACTGCTTCAT | SEQ ID NO:608 |
| No homology | | |
| BM735457.V1.3_at | AGGAACCTAACCTGATGCTCTTTCG | SEQ ID NO:609 |
| BM735457.V1.3_at | AGGACCCAACTCTGAATACATTTTT | SEQ ID NO:610 |
| BM735457.V1.3_at | AGGGCAGTTTTCTTTGCCCAAGCCT | SEQ ID NO:611 |
| BM735457.V1.3_at | AGCCTGCACATCTTCTCAGCAAAAA | SEQ ID NO:612 |
| BM735457.V1.3_at | AAGCCTTCGGTGCTAGTTAGCTCTC | SEQ ID NO:613 |
| BM735457.V1.3_at | AACTCCCTTAATCTTTCACACATGC | SEQ ID NO:614 |
| BM735457.V1.3_at | GCAATAATCCCCACCTGTCTAAAAA | SEQ ID NO:615 |
| BM735457.V1.3_at | GAAGATTTCTCTCTGTGACTGCAAC | SEQ ID NO:616 |
| BM735457.V1.3_at | GAGAGGTTGCCCTACGAACAGACAG | SEQ ID NO:611 |
| BM735457.V1.3_at | GAAATGTTAACTCCCTTTTGCAGAA | SEQ ID NO:6l8 |
| BM735457.V1.3_at | GATTGAGATTCAACCTGGCCTTACC | SEQ ID NO:619 |
| No Homology | | |
| BM735487.V1.3_at | GAGTTCGAAGTCACCCTAATCACGT | SEQ ID NO:620 |
| BM735487.V1.3_at | CACCAGGACTCTAGCCCCAGAGTGG | SEQ ID NO:621 |
| BM735487.V1.3_at | AAATGGAACTCTCCTTTTCGAGCAT | SEQ ID NO:622 |
| BM735487.V1.3_at | CGGCCCGGACACAAGGAGGAAGCTC | SEQ ID NO:623 |
| BM735487.V1.3_at | GCGTCTGACCCCAGCGAAGGGCCAG | SEQ ID NO:624 |
| BM735487.V1.3_at | GAAGGGCCAGCCTTGCTTGGTTCAG | SEQ ID NO:625 |
| BM735487.V1.3_at | GACTGTGGAGGGACAGGCTTCCCCT | SEQ ID NO:626 |
| BM735487.V1.3_at | GTTAGCTTCCCCAAAAGAATTGTGT | SEQ ID NO:627 |
| BM735487.V1.3_at | GTCACCCTAATCACGTAAATGGAAC | SEQ ID NO:628 |
| BM735487.V1.3_at | GTGCTTGCTTGGGAGTTCGAAGTCA | SEQ ID NO:629 |
| BM735487.V1.3_at | TAGCCCCAGAGTGGCTCCAGAAGGT | SEQ ID NO:630 |
| Ring finger protein | | |
| 10, clone ERLTF2001835 | | |
| BM735519.V1.3_at | CAGGCTACCTTCTCCATTTGGTTTT | SEQ ID NO:631 |
| BM735519.V1.3_at | AGATGTGTGGCCCAAAACTGCTCCA | SEQ ID NO:632 |
| BM735519.V1.3_at | AGCCTTCATGAAGCTGGACACGCCA | SEQ ID NO:633 |
| BM735519.V1.3_at | AGAAGCTCCTGTTCAGCACCTCAGT | SEQ ID NO:634 |
| BM735519.V1.3_at | AATACAGTGTATTTTCCAGCTTCCT | SEQ ID NO:635 |
| BM735519.V1.3_at | CAAGTGACACTACTGGCCCAGGCTA | SEQ ID NO:636 |
| BM735519.V1.3_at | CCGTGCTTTTGTTTTGCTGCTGTAA | SEQ ID NO:637 |
| BM735519.V1.3_at | TGAAAACAGCTTAATTCCTCCTGCC | SEQ ID NO:638 |
| BM735519.V1.3_at | TGATAACTCGGACCGTGTTCCTGTG | SEQ ID NO:639 |
| BM735519.V1.3_at | TTCCAGAATTCCTTCAGCCAAGCTA | SEQ ID NO:640 |
| BM735519.V1.3_at | TTCGGATCCCCTCTCTGAAGAGAAA | SEQ ID NO:641 |
| PREDICTED: Bos taurus | | |
| similar to | | |
| hypothetical protein | | |
| (LOC515494) | | |
| BM735534.V1.3_at | ATTAGAGGGCAGCTCAGCCTCCCTT | SEQ ID NO:642 |
| BM735534.V1.3_at | AGGATCATAGGCCTGGACACTCCAT | SEQ ID NO:643 |
| BM735534.V1.3_at | AGTCACAGTGACAACAACCCATTAG | SEQ ID NO:644 |
| BM735534.V1.3_at | AGAGGATGAGCCACTGCTTGCCTGA | SEQ ID NO:645 |
| BM735534.V1.3_at | ACTGCTTGCCTGAGGTGACCTGGCT | SEQ ID NO:646 |
| BM735534.V1.3_at | AATGCCAATTGGCTGGAGACTTCCA | SEQ ID NO:647 |
| BM735534.V1.3_at | AATGCCATAGGTTAGATGTCCCTCA | SEQ ID NO:648 |
| BM735534.V1.3_at | CACCATTCAGGTGGCTGTTTTTAAA | SEQ ID NO:649 |
| BM735534.V1.3_at | GCATTTGGGCAGAGCCTGAACTCAA | SEQ ID NO:650 |
| BM735534.V1.3_at | GAGAGAGGGCTCACACAGAGCTCCC | SEQ ID NO:651 |
| BM735534.V1.3_at | TATCCCATAGCTAGGTTATTGCCCA | SEQ ID NO:652 |
| Transglutaminase E3 | | |
| (TGASE3) (6- | | |
| sialyltransferase), | | |
| transcript variant 2 | | |
| BM735536.V1.3_at | GTCCCGGGTACGTTTTGAGATCCTG | SEQ ID NO:653 |
| BM735536.V1.3_at | ACAAGTTCCCTGCAATCAAGGCCAT | SEQ ID NO:654 |
| BM735536.V1.3_at | ATGCTGTCCATCGACGTGGCTGAGT | SEQ ID NO:655 |
| BM735536.V1.3_at | AGTCGGTCTGGACTGTTTGCTGATC | SEQ ID NO:656 |
| BM735536.V1.3_at | AGCGACCCTCCGAATGGATGCTCAG | SEQ ID NO:657 |
| BM735536.V1.3_at | ACGCCCATCAATGCTGCAGGACAGA | SEQ ID NO:658 |
| BM735536.V1.3_at | GACAGAGTGGCACCTGACCCAGCGA | SEQ ID NO:659 |
| BM735536.V1.3_at | GACTTGATCACTTTTGCACATTCCC | SEQ ID NO:660 |
| BM735536.V1.3_at | GGTTAACCATCTGTCATGGCACTCG | SEQ ID NO:661 |
| BM735536.V1.3_at | TGCAGTTGGGACATTCGTGCTACTC | SEQ ID NO:662 |
| BM735536.V1.3_at | TTGCTGACTTCTCCTGCGACAAGTT | SEQ ID NO:663 |
| CD68 protein | | |
| BM735545.V1.3_at | ACAGGAGCCTTTGGGCCAAGTTTCT | SEQ ID NO:664 |
| BM735545.V1.3_at | ATTACCTTCTGTGTCATCCGGAGAC | SEQ ID NO:665 |
| BM735545.V1.3_at | AGAGACCAAATTATCTTCCTTCCCT | SEQ ID NO:666 |
| BM735545.V1.3_at | AGAAACGCAAGCATCGCTCTTTCAC | SEQ ID NO:667 |
| BM735545.V1.3_at | AAATCTTTGTCCCTGATTTCCCTTG | SEQ ID NO:668 |
| BM735545.V1.3_at | AAGTTTCTCTTGTCCCAGTGACCAG | SEQ ID NO:669 |
| BM735545.V1.3_at | CTGAAGCTACAAGCTGCTCAGCTGA | SEQ ID NO:670 |
| BM735545.V1.3_at | CCTAGGCCAGAGATTCAGTTGCAGA | SEQ ID NO:671 |
| BM735545.V1.3_at | TACTCGGCCGACTCAGAGACCAAAT | SEQ ID NO:672 |
| BM735545.V1.3_at | TACCAGCCACTCTGAGCGTTTATCC | SEQ ID NO:673 |
| BM735545.V1.3_at | TTCCCTCTCTGTCCTGAAGAACAAA | SEQ ID NO:674 |
| No Homology | | |
| BM735573.V1.3_at | ACTAGTGTGGGAGAAACCAGCTTTT | SEQ ID NO:675 |
| BM735573.V1.3_at | ATCACTGCTTTACTCTGTTAATTTA | SEQ ID NO:676 |
| BM735573.V1.3_at | AAAAATCACTGCTTTACTCTGTTAA | SEQ ID NO:677 |
| BM735573.V1.3_at | AAATCACTGCTTTACTCTGTTAATT | SEQ ID NO:678 |
| BM735573.V1.3_at | CACTGCTTTACTCTGTTAATTTACA | SEQ ID NO:679 |
| BM735573.V1.3_at | GCTTTTACTGTTTAAAAATCACTGC | SEQ ID NO:680 |
| BM735573.V1.3_at | GCTTTACTCTGTTAATTTACAAGGA | SEQ ID NO:681 |
| BM735573.V1.3_at | GAATTCGGCACGAGGAAATTCCTAA | SEQ ID NO:682 |
| BM735573.V1.3_at | GATACTACAGTGAAACTAGTGTGGG | SEQ ID NO:683 |
| BM735573.V1.3_at | TGGGAGAAACCAGCTTTTACTGTTT | SEQ ID NO:684 |
| BM735573.V1.3_at | TCGGCACGAGGAAATTCCTAACAAG | SEQ ID NO:685 |
| Minor | | |
| histocompatibility | | |
| antigen H13 isoform 1 | | |
| (H13), desmosome | | |
| associated protein | | |
| (PNN) | | |
| BM735576.V1.3_at | ATCTTCATCATGCACATCTTCAAGC | SEQ ID NO:686 |
| BM735576.V1.3_at | AGGGATGGACCAGCACAGGCCTGCA | SEQ ID NO:687 |
| BM735576.V1.3_at | CATCCTGGTGGCACTGGCCAAAGGA | SEQ ID NO:688 |
| BM735576.V1.3_at | GCATGTGGCAGGATCCCTCCAGCAG | SEQ ID NO:689 |
| BM735576.V1.3_at | GAAATGATGCGGCTGCTGCCTGACC | SEQ ID NO:690 |
| BM735576.V1.3_at | GAGTCAAGCCCTAAGGATCCAGCGG | SEQ ID NO:691 |
| BM735576.V1.3_at | GATCCAGCGGCAGTGACAGAATCCA | SEQ ID NO:692 |
| BM735576.V1.3_at | GGGAACAGAGGCCTCAGCATCAAAG | SEQ ID NO:693 |
| BM735576.V1.3_at | TGCGGTTTGACATCAGCTTGAAGAA | SEQ ID NO:694 |
| BM735576.V1.3_at | TGGGTCTTACCATCTTCATCATGCA | SEQ ID NO:695 |
| BM735576.V1.3_at | TTGAAGAAGAACACCCACACCTACT | SEQ ID NO:696 |
| Fc-epsilon-receptor | | |
| gamma-chain | | |
| BM735585.V1.3_at | ATGATTCCAGCAGTGGTCTTGCTCT | SEQ ID NO:697 |
| BM735585.V1.3_at | ACCCTACCCCTGTAATGATGCTATG | SEQ ID NO:698 |
| BM735585.V1.3_at | CTGCCATTAATGCTAGCTGACCCTA | SEQ ID NO:699 |
| BM735585 V1.3_at | GTACCCGGACCCAGGAGACTTATGA | SEQ ID NO:700 |
| BM735585.V1.3_at | GAGAGCCTCAGCTTTGCTATATTCT | SEQ ID NO:701 |
| BM735585.V1.3_at | GATGCCATCCTGTTCTTGTATGGTA | SEQ ID NO:702 |
| BM735585.V1.3_at | TGTTTATATTCTAGTCTCACCCCTA | SEQ ID NO:703 |
| BM735585.V1.3_at | TTTCAAACAGATGCCCTTGGTCACA | SEQ ID NO:704 |
| BM735585.V1.3_at | TAACGGACATCAGTGGTTCCTCTTC | SEQ ID NO:705 |
| BM735585.V1.3_at | TTGGTTGAACAAGCAGCGGCCCTGG | SEQ ID NO:706 |
| BM735585.V1.3_at | TTGCTCTTACTCCTTTTGGTTGAAC | SEQ ID NO:707 |
| BM781012.V1.3_at | CAGAAGAACGTCTCCAAGAACCCGG | SEQ ID NO:708 |
| BM781012.V1.3_at | CACCAAGACCAAAGGGCGGTCCCAG | SEQ ID NO:709 |
| BM781012.V1.3_at | AGGAGCCGCAAGTGTACGTCCTGGC | SEQ ID NO:710 |
| BM781012.V1.3_at | AGTTCAACAGCACTTACCGCGTGGT | SEQ ID NO:711 |
| BM781012.V1.3_at | AATCAACATCGAGTGGCAGAGTAAT | SEQ ID NO:712 |
| BM781012.V1.3_at | ACCCAGACGAGCTGTCCAAGAGCAA | SEQ ID NO:713 |
| BM781012.V1.3_at | ACGAGCTGTCCAAGAGCAAGGTCAG | SEQ ID NO:714 |
| BM781012.V1.3_at | AAGCTCTCCGTGGACAGGAACAGGT | SEQ ID NO:715 |
| BM781012.V1.3_at | GCACTTACCGCGTGGTCAGCGTCCT | SEQ ID NO:716 |
| BM781012.V1.3_at | TCGAGAGGACCATCACCAAGACCAA | SEQ ID NO:717 |
| BM781012.V1.3_at | TACCCACCTGAAATCAACATCGAGT | SEQ ID NO:718 |
| GM2 ganglioside | | |
| activator | | |
| BM781174.V1.3_at | AGCTGGCTCAGCAACGGGAACTACC | SEQ ID NO:719 |
| BM781174.V1.3_at | AACGCTGTCACAGACCTAGCAGTTA | SEQ ID NO:720 |
| BM781174.V1.3_at | AAGTGGCTGGCGTATGGGTCAAAAT | SEQ ID NO:721 |
| BM781174.V1.3_at | GCGGACCCACCATTTGCAATGAGAC | SEQ ID NO:722 |
| BM781174.V1.3_at | GCTGTACTTTTGACAATGCCTGTGA | SEQ ID NO:723 |
| BM781174.V1.3_at | TAGCAGTTAACCAGGCGCGGACCCA | SEQ ID NO:724 |
| BM781174.V1.3_at | GAACTACCGTGTCCAGAGCATCCTG | SEQ ID NO:725 |
| BM781174.V1.3_at | GGGAAGGACCCTATGGTGCTCAAAA | SEQ ID NO:726 |
| BM781174.V1.3_at | GGCTCCGTAGCTTTTCCTGGGATAA | SEQ ID NO:727 |
| BM781174.V1.3_at | TGGTGCTCAAAAGCCTGACTCTGGA | SEQ ID NO:728 |
| BM781174.V1.3_at | TGATATACTAGACGCTTTGACTCCC | SEQ ID NO:729 |
| No homology | | |
| BM781178_unkn.V1.3_at | ATAGCCTCCATTTCCTTCAATAGAT | SEQ ID NO:730 |
| BM781178_unkn.V1.3_at | ATCGTTTAAGGCAGATGTCCCCGGA | SEQ ID NO:731 |
| BM781178_unkn.V1.3_at | ATCACCAGTTCTTATGTCACCTTAG | SEQ ID NO:732 |
| BM781178_unkn.V1.3_at | AGTGGGATGCCTTAAACACCCGCAC | SEQ ID NO:733 |
| BM781178_unkn.V1.3_at | CAAACTGGTATCTGTCATCTGGTAA | SEQ ID NO:734 |
| BM781178_unkn.V1.3_at | GCAGACCGATGTGGTACCGGCTGAA | SEQ ID NO:735 |
| BM781178_unkn.V1.3_at | GATGTCCCCGGAAGAGCAGTTTTTT | SEQ ID NO:736 |
| BM781178_unkn.V1.3_at | GGGATGCCTCAAAATGCAGACCGAT | SEQ ID NO:737 |
| BM781178_unkn.V1.3_at | GGATCCGATCTATTGTTACAGGCAC | SEQ ID NO:738 |
| BM781178_unkn.V1.3_at | TGGTTCGTTATCTTCTCTTTGGCAA | SEQ ID NO:739 |
| BM781178_unkn.V1.3_at | TGGGTTGCTACTGCCATGGTTTGAA | SEQ ID NO:740 |
| BM781178.V1.3_at | ATTTTGAGGCATCCCTTCTAGGTGC | SEQ ID NO:741 |
| BM781178.V1.3_at | AAATGGAGGCTATCGTCATGGCAGG | SEQ ID NO:742 |
| BM781178.V1.3_at | CAGTTCCTTCAAACCATGGCAGTAG | SEQ ID NO:743 |
| BM781178.V1.3_at | GATCCCCTCTGGTTATAGTTCGTGA | SEQ ID NO:744 |
| BM781178.V1.3_at | GTAGCAACCCAGTGCCTGTAACAAT | SEQ ID NO:745 |
| BM781178.V1.3_at | GGGAATATTCTTTCAGCCGGTACCA | SEQ ID NO:746 |
| BM781178.V1.3_at | TTTAAGGCATCCCACTGTAGACTCT | SEQ ID NO:747 |
| BM781178.V1.3_at | TGTAGACTCTTCTCTCGGGAATATT | SEQ ID NO:748 |
| BM781178.V1.3_at | TCTGTCCCCACCATTGATTCTAAGG | SEQ ID NO:749 |
| BM781178.V1.3_at | TACCACATCGGTCTGCATTTTGAGG | SEQ ID NO:750 |
| BM781178.V1.3_at | TAGGTGCTCAATGCCATTACCAGAT | SEQ ID NO:751 |
| Membrane-spanning 4- | | |
| domains, subfamily A, | | |
| member 6A, transcript | | |
| variant 1 | | |
| BM781186.V1.3_at | ATAGGAGCCTTGTGTTTTGTCATCT | SEQ ID NO:752 |
| BM781186.V1.3_at | AAGCCTTTGGTTCAGAGCAGCCTAG | SEQ ID NO:753 |
| BM781186.V1.3_at | AAGTTCTCGGGACTATCCAGATCCT | SEQ ID NO:754 |
| BM781186.V1.3_at | CAGCATTTTACCCAAGCGTTTTCTA | SEQ ID NO:755 |
| BM781186.V1.3_at | CTGCAAACATTCTGAGCTCTCTATC | SEQ ID NO:756 |
| BM781186.V1.3_at | GAAGGCTGCTTACCCATTCATAGGA | SEQ ID NO:757 |
| BM781186.V1.3_at | GAATTATTTTGGCATCGGCTTCCTT | SEQ ID NO:758 |
| BM781186.V1.3_at | GTCATACTGGCTTCTTTGGGTCCTG | SEQ ID NO:759 |
| BM781186.V1.3_at | GTCATCTCTGGATCTCTATCAATCA | SEQ ID NO:760 |
| BM781186.V1.3_at | TAGCTGGAACCAACGGGCTGATCCT | SEQ ID ND:761 |
| BM781186.V1.3_at | TATCAGCTCTGGTGGGTTTCATCCT | SEQ ID NO:762 |
| No homology | | |
| BM781334.V1.3_at | GTCAAGTCTGACTGAATGAGGCCAC | SEQ ID NO:763 |
| BM781334.V1.3_at | AGAGGGACCTCGTCAGGCACTTCTA | SEQ ID NO:764 |
| BM781334.V1.3_at | ACTGCAGTAGTGACCCTTCAAGAGG | SEQ ID NO:765 |
| BM781334.V1.3_at | AAGAGACGTCATGGCCCCGTACGTG | SEQ ID NO:766 |
| BM781334.V1.3_at | CAGCCACTGGCTGATTTCAAGTCAT | SEQ ID NO:767 |
| BM781334.V1.3_at | CTGGTGGAAGAGATCCCGCGGAACC | SEQ ID NO:768 |
| BM781334.V1.3_at | GCCCTCGGAGCTTCTGCTGGTGGAA | SEQ ID NO:769 |
| BM781334.V1.3_at | GAAGCCCCTAGCTCAGGCAGAACAG | SEQ ID NO:770 |
| BM781334.V1.3_at | TGGAAAGTCCAGAGGTGTCACCAGG | SEQ ID NO:771 |
| BM781334.V1.3_at | TGGCTGTGATTGGAGTTCCGGACAT | SEQ ID NO:772 |
| BM781334.V1.3_at | TGTCCCACAGGGAGCTCAAAGAGTG | SEQ ID NO:773 |
| No homology | | |
| BM781417.V1.3_at | ATTTAGCTACTTTATTGCCTTTACA | SEQ ID NO:774 |
| BM781417.V1.3_at | AATTGTTATTATTACGCTCTTTGCG | SEQ ID NO:775 |
| BM781417.V1.3_at | GCCTTTACATTGCTTATTCTTATTG | SEQ ID NO:776 |
| BM781417.V1.3_at | GCACTTTCTTTGATTACACTTCCAT | SEQ ID NO:777 |
| BM781417.V1.3_at | GAATTCTGTCCTTCATTTACTTTGT | SEQ ID NO:778 |
| BM781417.V1.3_at | GAAAAGTCGTCTCCTAGTAACCAGT | SEQ ID NO:779 |
| BM781417.V1.3_at | GACAAACAGCTTTAAGTGCACTTTC | SEQ ID NO:780 |
| BM781417.V1.3_at | GATCTAGCTGGGAAACTGTCATGAG | SEQ ID NO:781 |
| BM781417.V1.3_at | GTTGCTTTTTCCTTCTTTGATCTAA | SEQ ID NO:782 |
| BM781417.V1.3_at | TAACTTCAATCCTCAGATCTAGCTG | SEQ ID NO:783 |
| BM781417.V1.3_at | TTCTGAAGCCTTTTATGTACCACTA | SEQ ID NO:784 |
| Homo sapiens 15 kDa | | |
| selenoprotein, | | |
| transcript variant 1 | | |
| Foe1060.V1.3_at | ATTTCCATTCTCCTACATTTGTTGA | SEQ ID NO:785 |
| Foe1060.V1.3_at | AGATATTCTAGCCTCCACAGATTGC | SEQ ID NO:786 |
| Foe1060.V1.3_at | AGATGATTGCTATGCTTCCTGTGCT | SEQ ID NO:787 |
| Foe1060.V1.3_at | ACCTTTCTGAGGATTTGTGTGGATC | SEQ ID NO:788 |
| Foe1060.V1.3_at | CCTCCAATCCGCTCATATTTTTGTA | SEQ ID NO:789 |
| Foe1060.V1.3_at | GAAACATTCACAAAGATTCGCGTTA | SEQ ID NO:790 |
| Foe1060.V1.3_at | GTTGGCAAGCTTAACAAACCTGTTT | SEQ ID NO:791 |
| Foe1060.V1.3_at | GTGTGGATCTGATATCCGGCAAATT | SEQ ID NO:792 |
| Foe1060.V1.3_at | GGCAAATTTTTGTGCTTTACATTCT | SEQ ID NO:793 |
| Foe1060.V1.3_at | TGTATTACCCAGCTTTCCTTTAAAT | SEQ ID NO:794 |
| Foe1060.V1.3_at | TGTGCTGTGTGCTCCTTGAAAGTAA | SEQ ID NO:795 |
| Transducin (beta)-like | | |
| 1X-linked receptor 1 | | |
| Foe1072.V1.3_at | ATAGATGTTCTATGCTGTCCTGGAC | SEQ ID NO:796 |
| Foe1072.V1.3_at | ACATCACAATGATTTGTCCCCAGCG | SEQ ID NO:797 |
| Foe1072.V1.3_at | AACCAGCCCATGACAGTTTTTTGTA | SEQ ID NO:798 |
| Foe1072.V1.3_at | GCAGTTTCCCTTTGCATTGTATTGC | SEQ ID NO:799 |
| Foe1072.V1.3_at | GACCCTTTTATCCTTTCTAGGCACA | SEQ ID NO:800 |
| Foe1072.V1.3_at | GACTGCATTTTGTAGCTCTGTAATC | SEQ ID NO:801 |
| Foe1072.V1.3_at | GTAATTTTCTTCTTTCCTGACTTTG | SEQ ID NO:802 |
| Foe1072.V1.3_at | GTGAGCCTACCTATAGCACTGGATT | SEQ ID NO:803 |
| Foe1072.V1.3_at | TGTCTGCATCATTTCTTTAGTTATC | SEQ ID NO:804 |
| Foe1072.V1.3_at | TTTGGGTCTAATTCTGTGAGCCTAC | SEQ ID NO:805 |
| Foe1072.V1.3_at | TTCTGCATGTTGTATCTAGTCTGAT | SEQ ID NO:806 |
| Homo sapiens mRNA; | | |
| cDNA DKFZp666I186 | | |
| (from clone | | |
| DKFZp666I186) | | |
| Foe545.V1.3_at | ATGTGATAACAGCACCTCTTCATCT | SEQ ID NO:807 |
| Foe545.V1.3_at | ACTTCAAGTCTTGCAATGGTGCTTT | SEQ ID NO:808 |
| Foe545.V1.3_at | AAACGCAACCAGTTCATCGGGATTT | SEQ ID NO:809 |
| Foe545.V1.3_at | CTTCCAAATTGGCTTTTACAGATCC | SEQ ID NO:810 |
| Foe545.V1.3_at | CAGCACCTCTTCATCTTTAACTTGA | SEQ ID NO:811 |
| Foe545.V1.3_at | CTTGGTTAGGAGTGGTTTGCTGCCC | SEQ ID NO:812 |
| Foe545.V1.3_at | GAAATTTCCTTTTCTGAGTGTTGAA | SEQ ID NO:813 |
| Foe545.V1.3_at | GTTAGCAGACTAGAAGACTTCCAAA | SEQ ID NO:814 |
| Foe545.V1.3_at | GGAACATTTTACACACTTCAAGTCT | SEQ ID NO:815 |
| Foe545.V1.3_at | TTTGCTGCCCTCCTCTAAAGGCAGT | SEQ ID NO:816 |
| Foe545.V1.3_at | TTCCTGTCAGTTTCATCCAATCTTA | SEQ ID NO:817 |
| Foe1019.V1.3_at | AAAGTGCTACACTCCTTTGGTGAGG | SEQ ID NO:818 |
| Foe1019.V1.3_at | AACGTGCTGGTTGTTGTGCTGGCTC | SEQ ID NO:819 |
| Foe1019.V1.3_at | AAGAGAAGGCAGCTGTCTTGGCCCT | SEQ ID NO:820 |
| Foe1019.V1.3_at | TGGCAAGGATTTCACCCCAGAGTTG | SEQ ID NO:821 |
| Foe1019.V1.3_at | CAGAGTTGCAGGCTTCCTATCAAAA | SEQ ID NO:822 |
| Foe1019.V1.3_at | GACAAGCTGCACGTGGATCCTGAGA | SEQ ID NO:823 |
| Foe1019.V1.3_at | GAGAAAGGCCTCTTTGTGCCCAAAG | SEQ ID NO:824 |
| Foe1019.V1.3_at | GAGATCCTGGCTTCTGCCTAATAAA | SEQ ID NO:825 |
| Foe1019.V1.3_at | GATCTGTCCAATCCTGGTGCTGTGA | SEQ ID NO:826 |
| Foe1019.V1.3_at | TGGTTGTCTACCCATGGACTCAGAG | SEQ ID NO:827 |
| Foe1019.V1.3_at | TGAGGGCGTGCATCATCTTGACAAC | SEQ ID NO:828 |
| Equus caballus | | |
| gelsolin mRNA | | |
| GI1592834.V1.3_at | ATCACCGTCGTGAAGCAAGGCTTTG | SEQ ID NO:829 |
| GI1592834.V1.3_at | AAAGACGGAAGCCTTGACCTCTGCT | SEQ ID NO:830 |
| GI1592834.V1.3_at | AACGATGCCTTTGTCCTGAAAACTC | SEQ ID NO:831 |
| GI1592834.V1.3_at | AAGGCAGCGAGCCAGACAGCTTCTG | SEQ ID NO:832 |
| GI1592834.V1.3_at | GAAGACCTGGCCACTGATGACGTCA | SEQ ID NO:833 |
| GI1592834.V1.3_at | GAAGAGGTCCCTGGCGAGTTCATGC | SEQ ID NO:834 |
| GI1592834.V1.3_at | GACCAGGTCTTTGTCTGGGTCGGAA | SEQ ID NO:835 |
| GI1592834.V1.3_at | GACAGCTACTGGTCTGTGGATCCCT | SEQ ID NO:836 |
| GI1592834.V1.3_at | GTATATCGACACAGACCCAGCTCAT | SEQ ID NO:837 |
| GI1592834.V1.3_at | GGAGCCACCCGAGCCGTTGAGATAA | SEQ ID NO:838 |
| GI1592834.V1.3_at | TCTTTGCCTGCTCCAACAAGATTGG | SEQ ID NO:839 |
| gi5441616.V1.3_at | ATAGCCTCACTAGAGGTCTAGCGGT | SEQ ID NO:840 |
| gi5441616.V1.3_at | AAACGTCTACTCTCTCCTGTAAGAA | SEQ ID NO:841 |
| gi5441616.V1.3_at | GCACCCCAGACCGTATTTATCATAT | SEQ ID NO:842 |
| gi5441616.V1.3_at | GAATCAGATTACTTTGGCAGGCTTG | SEQ ID NO:843 |
| gi5441616.V1.3_at | GACAACACACTTTACTTTGTAGCTG | SEQ ID NO:844 |
| gi5441616.V1.3_at | GACCAAGTTCTCTTCATTAACCAGG | SEQ ID NO:845 |
| gi5441616.V1.3_at | GGCAGGCTTGAACCTAAACTCTCAA | SEQ ID NO:846 |
| gi5441616.V1.3_at | GGATATGCCTGATTCTGATTGTACA | SEQ ID NO:847 |
| gi5441616.V1.3_at | GGAAATGAGTCCTCCTGAGAATATC | SEQ ID NO:848 |
| gi5441616.V1.3_at | TGATTGTACAGACAACGCACCCCAG | SEQ ID NO:849 |
| gi5441616.V1.3_at | TAGCGGTAACCATCTCTGTGAAGTG | SEQ ID NO:850 |
| Equus caballus Ig | | |
| epsilon heavy chain | | |
| (partial) | | |
| gi576646.V1.3_s_at | TTAAGCCTGAACTGGTCCCGGGAGA | SEQ ID NO:851 |
| gi576646.V1.3_s_at | AGAGCTCCAAGGACAAGGTCACCCT | SEQ ID NO:852 |
| gi576646.V1.3_s_at | AGACCCTGGTAAATGATGCCCTCTG | SEQ ID NO:853 |
| gi576646.V1.3_s_at | AATTTGCCTGCAAGGTGGTCCACGA | SEQ ID NO:854 |
| gi576646.V1.3_s_at | GAGACTTACAAGTGCACCGTGTCCC | SEQ ID NO:855 |
| gi576646.V1.3_s_at | GAAAGAGGTGTCCAAAGACCCTGGT | SEQ ID NO:856 |
| gi576646.V1.3_s_at | TGTCCCAAAGGACCCTCCAGAAAGA | SEQ ID NO:857 |
| gi576646.V1.3_s_at | GTGGACACCACCGACTGGATCGAGG | SEQ ID NO:858 |
| gi576646.V1.3_s_at | GGGAGCCCCTGCAGAAGCACACACT | SEQ ID NO:859 |
| gi576646.V1.3_s_at | TGCCCAGGGAAGTCGTGCGCTCCAT | SEQ ID NO:860 |
| gi576646.V1.3_s_at | TAATCCAGACAGACCAGCAAGCCAC | SEQ ID NO:861 |
| Equus caballus Toll- | | |
| like receptor 4 mRNA | | |
| GI9717252-3_at | ATCTTTGACATCTTAGCCATCCTAA | SEQ ID NO:862 |
| GI9717252-3_at | AGAAGGCTCCTGATTCAGATCCTCC | SEQ ID NO:863 |
| GI9717252-3_at | ACATCGTCTCCCAAGTCTTTTGAAT | SEQ ID NO:864 |
| GI9717252-3_at | ACAGGACTGCTAATCCCTTTGAGTT | SEQ ID NO:865 |
| GI9717252-3_at | AAACATCCTGGTCATTCTTTAGCGT | SEQ ID NO:866 |
| GI9717252-3_at | AAGTCAGCTAAGGAGTCCGTGCCAG | SEQ ID NO:867 |
| GI9717252-3_at | GCTGCAACATACCAGGCATTGTGCT | SEQ ID NO:868 |
| GI9717252-3_at | GAATGGAAACCATCTCATCTTTGAC | SEQ ID NO:869 |
| GI9717252-3_at | GACTGGGCCCCAGTGAGTTCAGAAA | SEQ ID NO:870 |
| GI9717252-3_at | GGCAGGTGATTCTGTCGTGCACAAG | SEQ ID NO:871 |
| GI9717252-3_at | TCTCTGTTCAATTTTCCCTTTTCTA | SEQ ID NO:872 |
| GI9717252-3M_at | ATAAGTTCTATTTCCACCTGATGCT | SEQ ID NO:873 |
| GI9717252-3M_at | AGAGACTTCATTCCTGGTGTGGCCA | SEQ ID NO:874 |
| GI9717252-3M_at | AAAGTTATTGTCGTGGTGTCCCAGC | SEQ ID NO:875 |
| GI9717252-3M_at | CAGCACTTCATTCAGAGCCGATGGT | SEQ ID NO:876 |
| GI9717252-3M_at | GCGGGTCGGTTTTCAGTATACTCAT | SEQ ID NO:877 |
| GI9717252-3M_at | CTGATGCTTCTTGCTGGCTGCAAAA | SEQ ID NO:878 |
| GI9717252-3M_at | GCATGCCCGTGCTGGGTTTTAACAA | SEQ ID NO:879 |
| GI9717252-3M_at | GATGCCTTTGTTATCTACTCAAGCC | SEQ ID NO:880 |
| GI9717252-3M_at | GGTGTGTGCAATACCCTTACAGATG | SEQ ID NO:881 |
| GI9717252-3M_at | TGAGTATGAGATTGCCCAGACCTGG | SEQ ID NO:882 |
| GI9717252-3M_at | TTAACAATGCCACCTGTCAGATTAG | SEQ ID NO:883 |
| GI9717252-5_at | AGTTAGGCAGCCATAGCTTCTCCAA | SEQ ID NO:884 |
| GI9717252-5_at | AGAAGTTCCCCATTGGACATCTCAA | SEQ ID NO:885 |
| GI9717252-5_at | CATCTCTCCACCTTGATATTGACAG | SEQ ID NO:886 |
| GI9717252-5_at | GAAAATGCCAGGATGATGCCGCCCA | SEQ ID NO:887 |
| GI9717252-5_at | GACCTGAATCTCTACAAAATCCCTG | SEQ ID NO:888 |
| GI9717252-5_at | GTGCAGGTGGTTCCTAACACTACTT | SEQ ID NO:889 |
| GI9717252-5_at | GTGGCCGTGGAGACAAAGCTTTCAT | SEQ ID NO:890 |
| GI9717252-5_at | TGGACTCTCCAGTTTACAGACGCTG | SEQ ID NO:891 |
| GI9717252-5_at | TGGACCTGAGCTTTAACCCCTTGAA | SEQ ID NO:892 |
| GI9717252-5_at | TGATGCATATCAGGGCCTCAACCAT | SEQ ID NO:893 |
| GI9717252-5_at | TTACGGTGCGTCATGCTTTCACAGG | SEQ ID NO:894 |
| GI9717252-5M_at | AAACAGGCCAGTGATTTTCCAGTAT | SEQ ID NO:895 |
| GI9717252-5M_at | AAAGATTTGACACATCTGCCCTGCG | SEQ ID NO:896 |
| GI9717252-5M_at | GATATTTCTTACACTAACACCCGAG | SEQ ID NO:897 |
| GI9717252-5M_at | GCGCGGACTGCACAATTTGACGATT | SEQ ID NO:898 |
| GI9717252-5M_at | GAATTCCGGTTAGCATACATTGATA | SEQ ID NO:899 |
| GI9717252-5M_at | GAAGGATTTCCCACATTGGAGCTCA | SEQ ID NO:900 |
| GI9717252-5M_at | GATTTTCCAGTATTCTTATCCCTCA | SEQ ID NO:901 |
| GI9717252-5M_at | GGATTTCCAGCATTCCACTTTGAAA | SEQ ID NO:902 |
| GI9717252-5M_at | GGAGCTCACCTCTCTCAAAAGGTTG | SEQ ID NO:903 |
| GI9717252-5M_at | TGAGTTTCAAGTCCTGCTGTTCTGA | SEQ ID NO:904 |
| GI9717252-5M_at | TACCAAGCCTTGAGTTTCTAGATCT | SEQ ID NO:905 |
| No Homology | | |
| WBC001A07_V1.3_at | ATGGTGCCATGGCTGGTAGCTTTTA | SEQ ID NO:906 |
| WBC001A07_V1.3_at | AGGCAGACACTGCTGTATTTAGAAA | SEQ ID NO:907 |
| WBC001A07_V1.3_at | AAAACAGAACTCACAGCCTTTCTCC | SEQ ID NO:9O8 |
| WBC001A07_V1.3_at | GCTAATGAAGCTTCTCATCTTCTAT | SEQ ID NO:909 |
| WBC001A07_V1.3_at | GAATATCTTGGCACACTTTAATGTC | SEQ ID NO:910 |
| WBC001A07_V1.3_at | GATATTTGTTGCACAGGCAGACACT | SEQ ID NO:911 |
| WBC001A07_V1.3_at | GTAGCTTTTAGTGAGTGCTGCAAGA | SEQ ID NO:912 |
| WBC001A07_V1.3_at | GATTTTTCATCTGATTTGTTCACGC | SEQ ID NO:913 |
| WBC001A07_V1.3_at | GTTCACGCAAATGTAGTTCTTATCA | SEQ ID NO:914 |
| WBC001A07_V1.3_at | TATACAAAATTTCCATTCCTCCCAA | SEQ ID NO:915 |
| WBC001A07_V1.3_at | TTCTCCCTGTGTCTTTGGCAATGTA | SEQ ID NO:916 |
| WBC001B11_V1.3_at | ATGAGCGTCTTTTCTCAGTACTCAG | SEQ ID NO:917 |
| WBC001B11_V1.3_at | AAAATAGCACCTCTGTGTCTTCTCT | SEQ ID NO:918 |
| WBC001B11_V1.3_at | AACACAGCTGTCTCGATTTCTGGTG | SEQ ID NO:919 |
| WBC001B11_V1.3_at | AAGGATGCATACTCAACCTCTGATC | SEQ ID NO:920 |
| WBC001B11_V1.3_at | AATGCAGTGTTTTTCTTGTGTGTCC | SEQ ID NO:921 |
| WBC001B11_V1.3_at | GAGACCACTGGTCATTCATTACCTG | SEQ ID NO:922 |
| WBC001B11_V1.3_at | GTAGAATCCCACTTTTGCTTTCTTT | SEQ ID NO:923 |
| WBC001B11_V1.3_at | GGAAGACCAATCTATCACCTTGAGT | SEQ ID NO:924 |
| WBC001B11_V1.3_at | TGTGACTGTCATCCTAGCCTTTTAA | SEQ ID NO:925 |
| WBC001B11_V1.3_at | TCTGGTGTATTTTGGTTCTCTTGGC | SEQ ID NO:926 |
| WBC001B11_V1.3_at | TCAAGTTTCATGTGGCCTGGGTGTT | SEQ ID NO:927 |
| WBC001C11_V1.3_at | ATCTATTTTCTTCAAACTTCTGCAA | SEQ ID NO:928 |
| WBC001C11_V1.3_at | AGCTGACTTTTTTATGTGCTCTAAA | SEQ ID NO:929 |
| WBC001C11_V1.3_at | AGCTCTTTAATCTCTTTATAAGTTA | SEQ ID NO:930 |
| WBC001C11_V1.3_at | ACAACAGTTGGTTAGCAAGCTGACT | SEQ ID NO:931 |
| WBC001C11_V1.3_at | AACTGGATCTCCAATTGATATTTTC | SEQ ID NO:932 |
| WBC001C11_V1.3_at | GCCAGTCCCTGACATATCATGGAAA | SEQ ID NO:933 |
| WBC001C11_V1.3_at | GACTTGTTTCAAGCTCTTTAATCTC | SEQ ID NO:934 |
| WBC001C11_V1.3_at | GAGTGCTTTCATTTTGATAACTGGA | SEQ ID NO:935 |
| WBC001C11_V1.3_at | GTATAACTCATTTGCAGTCTGGAAA | SEQ ID NO:936 |
| WBC001C11_V1.3_at | GGCACAAATTTCTTTTTAAGACTTG | SEQ ID NO:937 |
| WBC001C11_V1.3_at | TTTTTTAGTGCCAGTCCCTGACATA | SEQ ID NO:938 |
| WBC001C11_V1.3_s_at | ATGCCTGCTTAGTGCTTTCTGATTA | SEQ ID NO:939 |
| WBC001C11_V1.3_s_at | ACTCGCATTCTGTTTCTTGCTTTAA | SEQ ID NO:940 |
| WBC001C11_V1.3_s_at | ACACACACTCATGGGATTCCAGTTA | SEQ ID NO:941 |
| WBC001C11_V1.3_s_at | TCTTTGCAAGTGCTTTTGGAACTAA | SEQ ID NO:942 |
| WBC001C11_V1.3_s_at | CCCCACAATGATTTTCTTTGCAAGT | SEQ ID NO:943 |
| WBC001C11_V1.3_s_at | GCTTTCTGATTACTCGCATTCTGTT | SEQ ID NO:944 |
| WBC001C11_V1.3_s_at | GCAGTTCTGTAGTGTCATTTCTTAT | SEQ ID NO:945 |
| WBC001C11_V1.3_s_at | GATTCCAGTTATTACGAGTTGCTTT | SEQ ID NO:946 |
| WBC001C11_V1.3_s_at | GTTGGATCAGTATTGCAGTTCTGTA | SEQ ID NO:947 |
| WBC001C11_V1.3_s_at | GTTTAAAGCCTAACACCATTCTAAT | SEQ ID NO:948 |
| WBC001C11_V1.3_s_at | TCTTGGATTAACTGATGCCTGCTTA | SEQ ID NO:949 |
| No Homology | | |
| WBC001C12_V1.3_at | ATTACTCACTTTTCACTTCTATCTA | SEQ ID NO:950 |
| WBC001C12_V1.3_at | AGTCAACTCCAAATTCTCATTCTTC | SEQ ID NO:951 |
| WBC001C12_V1.3_at | AGAATGACTGTTGGAGGCCGGCCCA | SEQ ID NO:952 |
| WBC001C12_V1.3_at | ACATGCTGTGCTTTGGTGGCCTAGG | SEQ ID NO:953 |
| WBC001C12_V1.3_at | AATGACCCAACCCTGTATTTATGCA | SEQ ID NO:954 |
| WBC001C12_V1.3_at | AATAATCAACAGTCTTCCCTTTCCT | SEQ ID NO:955 |
| WBC001C12_V1.3_at | GGGCTATAACCCCAACATATCGTGA | SEQ ID NO:956 |
| WBC001C12_V1.3_at | GGGTGTAGACCGACACAGCACGCAT | SEQ ID NO:957 |
| WBC001C12_V1.3_at | GGAAGCTCTTATTGGGCATATCTGC | SEQ ID NO:958 |
| WBC001C12_V1.3_at | TGTGGGCTCAGCATGAAGTCAACTC | SEQ ID NO:959 |
| WBC001C12_V1.3_at | TGCTGTGGCGGCATTCCATGTAGAA | SEQ ID NO:960 |
| RAB10, member RAS | | |
| oncogene family | | |
| (RAB10), | | |
| WBC001F08_V1.3_at | AAGTCTCTTGGGATCCTGTGTAGAA | SEQ ID NO:961 |
| WBC001F08_V1.3_at | AATTTTACTGTCTTGTTGCTTTCCT | SEQ ID NO:962 |
| WBC001F08_V1.3_at | GTTAAGTCCATTCTCTGGTACTAGC | SEQ ID NO:963 |
| WBC001F08_V1.3_at | GCAGCATTGCCAAATAATCCCTAAT | SEQ ID NO:964 |
| WBC001F08_V1.3_at | GTTGCTTTCCTTCATCTGGAATGTG | SEQ ID NO:965 |
| WBC001F08_V1.3_at | GGTACTAGCTACAATTCGGTTTCAT | SEQ ID NO:966 |
| WBC001F08_V1.3_at | GGCTACCTTTTGTTAAATCTGCACT | SEQ ID NO:967 |
| WBC001F08_V1.3_at | TTGCCCCTTTTTCTGTAAGTCTCTT | SEQ ID NO:968 |
| WBC001F08_V1.3_at | TATGCCTCACTGGTGGTTGTTCTTA | SEQ ID NO:969 |
| WBC001F08_V1.3_at | TTTGCTTAATATTAGGGCCTTGCCC | SEQ ID NO:970 |
| WBC001F08_V1.3_at | TTTCCCTCACTTGACTTTATCATTG | SEQ ID NO:971 |
| Retinoblastoma-like | | |
| 2 (p130) | | |
| WBC001F11_V1.3_at | ATTAAGAGGGATCAGCTGGCTAAGT | SEQ ID NO:972 |
| WBC001F11_V1.3_at | ATATCTTTGAGTGTGTTCCTGGCAG | SEQ ID NO:973 |
| WBC001F11_V1.3_at | ATCTTCTTTGATGCTTTTGTACTTT | SEQ ID NO:974 |
| WBC001F11_V1.3_at | TTGTTAAAGCCCCAGTAGCCACCTT | SEQ ID NO:975 |
| WBC001F11_V1.3_at | AAATTATGACCTCTTCCTTTAGGAG | SEQ ID NO:976 |
| WBC001F11_V1.3_at | AAACCTCTCAGATACTGCTACTGTA | SEQ ID NO:977 |
| WBC001F11_V1.3_at | GCTATTGTTCCAGCAGTTTTAACGT | SEQ ID NO:978 |
| WBC001F11_V1.3_at | GAAATTCTCCAGTTTTTGATTATTA | SEQ ID NO:979 |
| WBC001F11_V1.3_at | GTAGCCACCTTTTGGGCATATTTGA | SEQ ID NO:980 |
| WBC001F11_V1.3_at | TACTAGGTAACTTCACATTGCTCTG | SEQ ID NO:981 |
| WBC001F11_V1.3_at | TATACACCTTTATTAATCGCTATTG | SEQ ID NO:982 |
| Activated RNA poly- | | |
| merase II transcrip- | | |
| tion cofactor 4 | | |
| variant protein | | |
| (incomplete) | | |
| WBC001H09_V1.3_at | ATTTCCCGTACTCTTGGCATTTTAT | SEQ ID NO:983 |
| WBC001H09_V1.3_at | GAATACTCCTACCTCATTAGCTAGT | SEQ ID NO:984 |
| WBC001H09_V1.3_at | AAGAGTGTGTACATCCTGGCTTGGC | SEQ ID NO:985 |
| WBC001H09_V1.3_at | AATTGTGGAATACCTGTCTGCTTTG | SEQ ID NO:986 |
| WBC001H09_V1.3_at | GGAGTAAACATTCACGTAGTCACAA | SEQ ID NO:987 |
| WBC001H09_V1.3_at | GAAATTCTTTGCAACTCTCTTTTTA | SEQ ID NO:988 |
| WBC001H09_V1.3_at | GATTAACCTATTCTACATAACGTGT | SEQ ID NO:989 |
| WBC001H09_V1.3_at | GATTATTCTCTTTTGTTTTGCTTCA | SEQ ID NO:990 |
| WBC001H09_V1.3_at | GTCTGCTTTGTTTGGTACATCTTCC | SEQ ID NO:991 |
| WBC001H09_V1.3_at | TGTTTTGCTTCATCAATGCCTAAGA | SEQ ID NO:992 |
| WBC001H09_V1.3_at | TACAAGCAGCATTTGACCCATTTCC | SEQ ID NO:993 |
| No homology | | |
| WBC003D11_V1.3_at | ATCTTCATTTCCTCTTAGCTGTCAG | SEQ ID NO:994 |
| WBC003D11_V1.3_at | AGACAGAGTGTGCATTCCTTCTTGC | SEQ ID NO:995 |
| WBC003D11_V1.3_at | CATCGGACCAACTTGTAGCTGACTA | SEQ ID NO:996 |
| WBC003D11_V1.3_at | AATGTGCCCAGGCTGAACTGCTGGA | SEQ ID NO:997 |
| WBC003D11_V1.3_at | CGATAAGTCTCGCTTGTTCTTGCAC | SEQ ID NO:998 |
| WBC003D11_V1.3_at | GAGGTTGTCCTTAATCAGCCATCGG | SEQ ID NO:999 |
| WBC003D11_V1.3_at | GAGGGTGATTCGCATCTTCATTTCC | SEQ ID NO:1000 |
| WBC003D11_V1.3_at | GTCACATCCATGAGCCCAGTCAAGA | SEQ ID NO:1001 |
| WBC003D11_V1.3_at | GTCATTCCATTATACCAGCTGAGGT | SEQ ID NO:1002 |
| WBC003D11_V1.3_at | TATGGCTTGGCCTTGAGACTTGCTT | SEQ ID NO:1003 |
| WBC003D11_V1.3_at | TTCTTGCCCGTTACACGATAAGTCT | SEQ ID NO:1004 |
| IBR domain containing | | |
| 3 (IBRDC3) | | |
| WBC003F02_V1.3_at | ATGTGCCAGACATCACCTCAGATGA | SEQ ID NO:1005 |
| WBC003F02_V1.3_at | AGCAAGCCTTGGGACATCAGCCTGG | SEQ ID NO:1006 |
| WBC003F02_V1.3_at | CCTGGCCTGTGCTTTACTACAATGA | SEQ ID NO:1007 |
| WBC003F02_V1.3_at | GCCCTAGAGGGTGTCCTTGTGTGAA | SEQ ID NO:1008 |
| WBC003F02_V1.3_at | GAAGCACACTTGTTATGCACCTGCT | SEQ ID NO:1009 |
| WBC003F02_V1.3_at | GAAAGACTGTTTGGCCAGCAAGCCT | SEQ ID NO:1010 |
| WBC003F02_V1.3_at | GAGAGCATCCGCAGTGACCTGGAGA | SEQ ID NO:1011 |
| WBC003F02_V1.3_at | GATTCTTATCTCATGGGCACTGTAG | SEQ ID NO:1012 |
| WBC003F02_V1.3_at | GGATTGAATGCTCCTGTTCTGAGAA | SEQ ID NO:1013 |
| WBC003F02_V1.3_at | GGCACTGTAGCCAGACTTAGCACAT | SEQ ID NO:1014 |
| WBC003F02_V1.3_at | TGGAGAGCTCCGATACGCAGTCAGA | SEQ ID NO:101S |
| CGI-54 protein | | |
| WBC003H01_V1.3_at | ATATCAACATGACCCACTACATTCG | SEQ ID NO:1016 |
| WBC003H01_V1.3_at | ATGACTTGCAGAGCTTCGGCCTCGA | SEQ ID NO:1017 |
| WBC003H01_V1.3_at | ATGACCCACTACATTCGGCACCTGT | SEQ ID NO:1018 |
| WBC003H01_V1.3_at | AGAGCTTCGGCCTCGACAATATCAA | SEQ ID NO:1019 |
| WBC003H01_V1.3_at | GGGCATTGTGAACCCCCTGGACCGC | SEQ ID NO:1020 |
| WBC003H01_V1.3_at | ACGTCCATGACTTGCAGAGCTTCGG | SEQ ID NO:1021 |
| WBC003H01_V1.3_at | CTTCGGCCTCGACAATATCAACATG | SEQ ID NO:1022 |
| WBC003H01_V1.3_at | CTACATTCGGCACCTGTCATTCGGG | SEQ ID NO:1023 |
| WBC003H01_V1.3_at | GCACGTCCATGACTTGCAGAGCTTC | SEQ ID NO:1024 |
| WBC003H01_V1.3_at | GGAGGACTACCCGGGCATTGTGAAC | SEQ ID NO:1025 |
| WBC003H01_V1.3_at | GGCCTCGACAATATCAACATGACCC | SEQ ID NO:1026 |
| Heterogeneous nuclear | | |
| ribonucleoprotein F | | |
| WBC004B05_V1.3_at | ACTGTGATTTCTTTTTGGGTGTATT | SEQ ID NO:1027 |
| WBC004B05_V1.3_at | ACATTTCTCATGTTTGTTCATTCTA | SEQ ID NO:1028 |
| WBC004B05_V1.3_at | AAACTTTCTTTGTACTGTGATTTCT | SEQ ID NO:1029 |
| WBC004B05_V1.3_at | GAAAACTCAAGGTGCTAGATCCCTA | SEQ ID NO:1030 |
| WBC004B05_V1.3_at | GAGACGTGCTTTTTTGGAAAACTCA | SEQ ID NO:1031 |
| WBC004B05_V1.3_at | GAGACACATTACTAATACTGTAGGA | SEQ ID NO:1032 |
| WBC004B05_V1.3_at | GGGTGTATTTTGCTAAGTGAAACTT | SEQ ID NO:1033 |
| WBC004B05_V1.3_at | GTTCATTCTAGTTTATTTTCATTTA | SEQ ID NO:1034 |
| WBC004B05_V1.3_at | GTGAGGCCTTGACTTAAAACTTTCT | SEQ ID NO:1035 |
| WBC004B05_V1.3_at | GGTGCTAGATCCCTAATTCGAAGAG | SEQ ID NO:1036 |
| WBC004B05_V1.3_at | TTACACCACATCACCGTGAACACAT | SEQ ID NO:1037 |
| WBC004B05_V1.3_s_at | ATTACCTCTTCAGTGTTTTCTCATG | SEQ ID NO:1038 |
| WBC004B05_V1.3_s_at | AAAGCAGTTAACTCTAGAGGGAGCT | SEQ ID NO:1039 |
| WBC004B05_V1.3_s_at | AACATTTTGGTAGTGTACTTCAGAG | SEQ ID NO:1040 |
| WBC004B05_V1.3_s_at | GCAAACTTTCTTCTAGCATGTGATA | SEQ ID NO:1041 |
| WBC004B05_V1.3_s_at | GGACCCATTTTGCACCATGAGTTTG | SEQ ID NO:1042 |
| WBC004B05_V1.3_s_at | GGAGCATTTGAGTTGTTTCAATCAA | SEQ ID NO:1043 |
| WBC004B05_V1.3_s_at | TGTGGATCTTTTACACCACATCACC | SEQ ID NO:1044 |
| WBC004B05_V1.3_s_at | TAGAGGGAGCTGTGGGACCCATTTT | SEQ ID NO:1045 |
| WBC004B05_V1.3_s_at | TTCAGCTTTTCTCAATTAACATTTT | SEQ ID NO:1046 |
| WBC004B05_V1.3_s_at | TTTTCTCATGCAAACTTTCTTCTAG | SEQ ID NO:1047 |
| WBC004B05_V1.3_s_at | TTCAATCAAATTTTCACAGGCAGCC | SEQ ID NO:1048 |
| Dendritic cell protein | | |
| variant, clone: | | |
| CAE03638 | | |
| WBC004C03_V1.3_at | ATATCTTGGCTTTTCCTTGTGTGAG | SEQ ID NO:1049 |
| WBC004C03_V1.3_at | ATGTTTCCGCTCATGCTTCAGAGTA | SEQ ID NO:1050 |
| WBC004C03_V1.3_at | AGGCACTGCATTGGGTCATACTTAA | SEQ ID NO:1051 |
| WBC004C03_V1.3_at | AAATCTGTTTTGTCTTCTACTCCCT | SEQ ID NO:1052 |
| WBC004C03_V1.3_at | CTACCTTTTACTTCATGTTTCCGCT | SEQ ID NO:1053 |
| WBC004C03_V1.3_at | GAGAGACCTGTCAACATTTTGTTAT | SEQ ID NO:1054 |
| WBC004C03_V1.3_at | GTTATTGTTTGCTGCTAGTCGCTTT | SEQ ID NO:1055 |
| WBC004C03_V1.3_at | GTAATCCACTATCCAGAGAGACCTG | SEQ ID NO:1056 |
| WBC004C03_V1.3_at | GTGGCATGTTTCCAAGGCACTGCAT | SEQ ID NO:1057 |
| WBC004C03_V1.3_at | TGTTTTGTATCTTCTGTCAGAGCCA | SEQ ID NO:1058 |
| WBC004C03_V1.3_at | TTCCCTTCCCAAACATGTCTATGTT | SEQ ID NO:1059 |
| No Homology | | |
| WBC004D07_V1.3_at | ATCCATCCCACAGTCAACTGGTTGA | SEQ ID NO:1060 |
| WBC004D07_V1.3_at | AGTTTGCTGGCCAATTGCACCTGCT | SEQ ID NO:1061 |
| WBC004D07_V1.3_at | ACCTGCTGTGTTGTTTTCCATCCAT | SEQ ID NO:1062 |
| WBC004D07_V1.3_at | AAACGGTCTGTGATTTTGGAACTGG | SEQ ID NO:1063 |
| WBC004D07_V1.3_at | CATACCTTCTCATGTGCATTTCAGT | SEQ ID NO:1064 |
| WBC004D07_V1.3_at | GAAAGACTTCTTAGCGTTCCAGTTT | SEQ ID NO:1065 |
| WBC004D07_V1.3_at | GACTGTGGCACACTGATGCACTGAA | SEQ ID NO:1066 |
| WBC004D07_V1.3_at | GAGTCATGGATTTCTTTGCTTACAA | SEQ ID NO:1067 |
| WBC004D07_V1.3_at | GTAACACCATTTTTCTTTGAGACTA | SEQ ID NO:1068 |
| WBC004D07_V1.3_at | GTGGCTGCAGGAATTCTTTTCTAAA | SEQ ID NO:1069 |
| WBC004D07_V1.3_at | TTATTTCTCCCCATGACTTCAAACA | SEQ ID NO:1070 |
| TRAF-interacting | | |
| protein with a | | |
| forkhead-associated | | |
| domain | | |
| WBC004E04_V1.3_at | ACGAAGTGGTGTGCCGGTACTGATC | SEQ ID NO:1071 |
| WBC004E04_V1.3_at | CAACGGTCATTTGTTTTCAAGGTCA | SEQ ID NO:1072 |
| WBC004E04_V1.3_at | ACTAGTGTTGTAGCCTGTTGGTACT | SEQ ID NO:1073 |
| WBC004E04_V1.3_at | AAGGAACTCTCTCTTGGTTTGGTCA | SEQ ID NO:1074 |
| WBC004E04_V1.3_at | GTTAGTCATCGATTTGGTCTCCTGT | SEQ ID NO:1075 |
| WBC004E04_V1.3_at | GTACTTATAGTACCAGTGTCCTGGA | SEQ ID NO:1076 |
| WBC004E04_V1.3_at | GGTCATATTATTTCACAACGGTCAT | SEQ ID NO:1077 |
| WBC004E04_V1.3_at | TGTTATTGTTATCTGCTGTGCTGGC | SEQ ID NO:1078 |
| WBC004E04_V1.3_at | TCTCCTGTTGCATTCCTGGATGTAT | SEQ ID NO:1079 |
| WBC004E04_V1.3_at | TCCCCTTCGTTACTGTGGTATGTTA | SEQ ID NO:1080 |
| WBC004E04_V1.3_at | TAGACGCTCCGCTTACGAAGTGGTG | SEQ ID NO:1081 |
| WBC005B09_V1.3_at | GCGCTGTAAGCCTCTGAAGGAATTT | SEQ ID NO:1082 |
| WBC005B09_V1.3_at | GAATTTATGCTTTCTCAAGATGCTG | SEQ ID NO:1083 |
| WBC005B09_V1.3_at | GACCGATTGGACTGGGATGAACATA | SEQ ID NO:1084 |
| WBC005B09_V1.3_at | GATGCTGAACATGAGCTGCTCTTTG | SEQ ID NO:1085 |
| WBC005B09_V1.3_at | GTATTGCCGTGTTTATTTTGCTTAA | SEQ ID NO:1086 |
| WBC005B09_V1.3_at | GTAAATATTTCCATCATGACCGATT | SEQ ID NO:1087 |
| WBC005B09_V1.3_at | GGGTTTACAGTATTTCCAACACATG | SEQ ID NO:1088 |
| WBC005B09_V1.3_at | GGAGATATGTTTCAAGGCGCTGTAA | SEQ ID NO:1089 |
| WBC005B09_V1.3_at | TGAGCTGCTCTTTGACCTCATTGAG | SEQ ID NO:1090 |
| WBC005B09_V1.3_at | TCCCAACCATGTGATGTCTGGAGTA | SEQ ID ˜O:1091 |
| WBC005B09_V1.3_at | TAAAGCATCCTTTCTTTTACCCTCT | SEQ ID NO:1092 |
| Homo sapiens | | |
| hypothetical protein | | |
| FLJ22662, mRNA | | |
| WBC005D02_V1.3_at | ATCTTCCGGCGCGACCAAGGGAAAG | SEQ ID NO:1093 |
| WBC005D02_V1.3_at | ATCTGCTGCCGTGAGGACCTGAACT | SEQ ID NO:1094 |
| WBC005D02_V1.3_at | ATGCCAGAGGCCTACAACTTTGATT | SEQ ID NO:1095 |
| WBC005D02_V1.3_at | AGTCCTGGAGGCTGCTACGATACGA | SEQ ID NO:1096 |
| WBC005D02_V1.3_at | ACAGCCTATGCCATTAGTGGTCCCA | SEQ ID NO:1097 |
| WBC005D02_V1.3_at | AGCTGGGTTTGGACTTCTCTTATGA | SEQ ID NO:1098 |
| WBC005D02_V1.3_at | ACCGGTTCAACAAAACTCTCCATGA | SEQ ID NO:1099 |
| WBC005D02_V1.3_at | AAATCTACAACTGGAGTGGCTACCC | SEQ ID NO:110O |
| WBC005D02_V1.3_at | GTGGCTACCCAATGCTGGTTCAGAA | SEQ ID NO:1101 |
| WBC005D02_V1.3_at | GTGGTCTCCCTGTTTTTCACTGGAA | SEQ ID NO:1102 |
| WBC005D02_V1.3_at | TTCTCTTATGATCTGGCTCCACGAG | SEQ ID NO:1103 |
| Polymeric | | |
| immunoglobulin | | |
| receptor 3 precursor | | |
| (PIGR3) | | |
| WBC005F10_V1.3_at | TTTCGACTGGCGCAACGTTTGGTAA | SEQ ID NO:1104 |
| WBC005F10_V1.3_at | ATAACTTTTGTACCGTGCCCTCTAT | SEQ ID NO:1105 |
| WBC005F10_V1.3_at | AGTGGTTAAGGCTTCCTATCCAGAA | SEQ ID NO:1106 |
| WBC005F10_V1.3_at | AGCCCAGCTTCCTGAGTACCAATAA | SEQ ID NO:1107 |
| WBC005F10_V1.3_at | CAGTGACTGACCCATATGTAGCAAA | SEQ ID NO:1108 |
| WBC005F10_V1.3_at | GCCTGCAGCGTGAGAAGACTTCCCA | SEQ ID NO:1109 |
| WBC005F10_V1.3_at | GCTGCTCACTCACTGTGGGATGTTA | SEQ ID NO:1110 |
| WBC005F10_V1.3_at | GATAATACCCACTTTCTAGGATTGT | SEQ ID NO:1111 |
| WBC005F10_V1.3_at | GATGTTATGAAAGCGACCCTTCCAA | SEQ ID NO:1112 |
| WBC005F10_V1.3_at | TAACGTTTGACCCTGAGGCCCAGAG | SEQ ID NO:1113 |
| WBC005F10_V1.3_at | TTCCTTCTGGATCGTTTCTCCAAGA | SEQ ID NO:1114 |
| Homo sapiens | | |
| methionine | | |
| adenosyltransferase | | |
| II, beta (MAT2B) | | |
| WBC006E03_V1.3_at | ATAAAACTGTCCTTTTCACTCCATG | SEQ ID NO:1115 |
| WBC006E03_V1.3_at | AGGTTTTTATGCTCGAGATCTTTCG | SEQ ID NO:1116 |
| WBC006E03_V1.3_at | ACAGATCTGCTGTAGACTTGTTTTT | SEQ ID NO:1117 |
| WBC006E03_V1.3_at | GTATATTGGAACTCCTGCAGCTTCG | SEQ ID NO:1118 |
| WBC006E03_V1.3_at | TGGCTTAACTCGCTGTTTGCGTATA | SEQ ID NO:1119 |
| WBC006E03_V1.3_at | GGCCTTGTAAGTCTTTTGACCATTC | SEQ ID NO:1120 |
| WBC006E03_V1.3_at | TGCTCTTGCGCTAGTGAAATGGTCT | SEQ ID NO:1121 |
| WBC006E03_V1.3_at | TTTGCAACTGTTGACCCTTTTATGT | SEQ ID NO:1122 |
| WBC006E03_V1.3_at | TGCATCGTTCATTCCTATAAGCTCT | SEQ ID NO:1123 |
| WBC006E03_V1.3_at | TATTTGCTTTGCCTGAGCTCAGATC | SEQ ID NO:1124 |
| WBC006E03_V1.3_at | TATCATTTTGTTTGTTCTGGCTTAA | SEQ ID NO:1125 |
| Ubiquitin-conjugating | | |
| enzyme E2B (RAD6 | | |
| homolog) (UBE2B) | | |
| WBC006H06_V1.3_at | ATTCACAATTTGCACCTCTATCATG | SEQ ID NO:1126 |
| WBC006H06_V1.3_at | AGGCTACTTGTTACTGTTTCTTCAT | SEQ ID NO:1127 |
| WBC006H06_V1.3_at | ACAAGCTATCCTATGCCTTCAAATA | SEQ ID NO:1128 |
| WBC006H06_V1.3_at | AATGTTTTAATACTAGGGCCTGCTG | SEQ ID NO:1129 |
| WBC006H06_V1.3_at | AATCCATGCCCCACTATTAACAATG | SEQ ID NO:1130 |
| WBC006H06_V1.3_at | AATTGGCACCTCTACCTTGAGCAGA | SEQ ID NO:1131 |
| WBC006H06_V1.3_at | GCTGAGTTGCTTTCTCTTGTGGAGA | SEQ ID NO:1132 |
| WBC006H06_V1.3_at | GCAATTGCCTATCTGTTTATTCTGG | SEQ ID NO:1133 |
| WBC006H06_V1.3_at | GTTAAACTGTACCTTTTGCGATTCA | SEQ ID NO:1134 |
| WBC006H06_V1.3_at | GTTTCTTCATGCACTACTTACTGTT | SEQ ID NO:1135 |
| WBC006H06_V1.3_at | GTCTGTCCAACTCTGTATTTAGGCT | SEQ ID NO:1136 |
| No homology | | |
| WBC007A09_V1.3_at | ATCAATCCAGCAATCTGAGCGCTTC | SEQ ID NO:1137 |
| WBC007A09_V1.3_at | AGGGCTTATGCTATTTCCTGTTTCT | SEQ ID NO:1138 |
| WBC007A09_V1.3_at | AGCATCATGTCTCACTTGGGTTACT | SEQ ID NO:1139 |
| WBC007A09_V1.3_at | GAATTCTACTTCTGCCTAGGGCTTA | SEQ ID NO:1140 |
| WBC007A09_V1.3_at | GAGGTCTCCTTGATCCTTTAGTATA | SEQ ID NO:1141 |
| WBC007A09_V1.3_at | GGAACGTTCTACTAGGCGCTACATG | SEQ ID NO:1142 |
| WBC007A09_V1.3_at | TGAGCGCTTCTCAGGACTGTACTAC | SEQ ID NO:1143 |
| WBC007A09_V1.3_at | TAAGATGTGTGTTGTCTCTTTCCCT | SEQ ID NO:1144 |
| WBCOQ7A09_V1.3_at | TATGATCTTTCCTCAAGTGTCACCT | SEQ ID NO:1145 |
| WBC007A09_V1.3_at | TTCCTTGCTTCCTTTAACACACGAA | SEQ ID NO:1146 |
| WBC007A09_V1.3_at | TTGGGTTACTGCAGTAGCTCCCTGA | SEQ ID NO:1147 |
| Transmembrane protein | | |
| 23 | | |
| WBC007G03_V1.3_at | ATTAGTTATCCATACTCTCATGACA | SEQ ID NO:1148 |
| WBC007G03_V1.3_at | ATATCCATTCTGTATTTTACGTGCA | SEQ ID NO:1149 |
| WBC007G03_V1.3_at | CATACTCTCATGACAATTTTGTTGG | SEQ ID NO:1150 |
| WBC007G03_V1.3_at | CTGATATCTTAACAGCTTACCTAGA | SEQ ID NO:1151 |
| WBC007G03_V1.3_at | GCAGAATTATCTTCCGTAGGGTTTT | SEQ ID NO:1152 |
| WBC007G03_V1.3_at | GTGCAGAAACTGCATGTAATTCTAA | SEQ ID NO:1153 |
| WBC007G03_V1.3_at | TTACGTGCAGCAGAATTATCTTCCG | SEQ ID NO:1154 |
| WBC007G03_V1.3_at | GTGTTCACATTCGTCACAAAGTTGT | SEQ ID NO:1155 |
| WBC007G03_V1.3_at | GGCTCTTATTTCTAATGTGTTCACA | SEQ ID NO:1156 |
| WBC007G03_V1.3_at | TTCTAAGTTTTACTCCTAACATAAG | SEQ ID NO:1157 |
| WBC007G03_V1.3_at | TTCTATTCTATACTTGCCAATGTGG | SEQ ID NO:1158 |
| No Homology | | |
| WBC007G12_V1.3_at | ATGTGTGTACTGTATCTGCCTTTCC | SEQ ID NO:1159 |
| WBC007G12_V1.3_at | AGTTGTGCAGTTTTTCTTTTCAGAA | SEQ ID NO:1160 |
| WBC007G12_V1.3_at | ACTGCCTGCTTTTTTGACCTTTGTT | SEQ ID NO:1161 |
| WBC007G12_V1.3_at | ACTGATTACTGTGTCTTGCTCTTCG | SEQ ID NO:1162 |
| WBC007G12_V1.3_at | AACAGTGATCCTAGGGCTGACCGCA | SEQ ID NO:1163 |
| WBC007G12_V1.3_at | GCAGCCTCTTTTGCATAGTCATGTA | SEQ ID NO:1164 |
| WBC007G12_V1.3_at | GGATTCAGTCTTGTCTTTTGTCTAG | SEQ ID NO:1165 |
| WBC007G12_V1.3_at | TGTTCATACAATGTGGCAGCCTCTT | SEQ ID NO:1166 |
| WBC007G12_V1.3_at | TGCCTTTCCACCACATTTTTATGAC | SEQ ID NO:1167 |
| WBC007G12_V1.3_at | TTATGACACTGTATTCCACTGCCTG | SEQ ID NO:1168 |
| WBC007G12_V1.3_at | TTGTTCCCTCGGATTTGTCCTATAA | SEQ ID NO:1169 |
| WBC008D05_V1.3_at | ATGCCCATGGAACATTCTCTAGGAT | SEQ ID NO:1170 |
| WBC008D05_V1.3_at | AGGATTGATCACATATTAGGCCACA | SEQ ID NO:1171 |
| WBC008D05_V1.3_at | AGAACATTCCATCCAAAAACCACAG | SEQ ID NO:1172 |
| WBC008D05_V1.3_at | ACACATTCTTTTTACATGCCCATGG | SEQ ID NO:1173 |
| WBC008D05_V1.3_at | AATACCATGCAGCTTTTCTGACCAC | SEQ ID NO:1174 |
| WBC008D05_V1.3_at | AATATCTATGCACCCAACACAGGAG | SEQ ID NO:1175 |
| WBC008D05_V1.3_at | GCAGCTTTTCTGACCACAAAGGTAT | SEQ ID NO:1176 |
| WBC008D05_V1.3_at | TAAGAGACAAAGACGGGCACTACAT | SEQ ID NO:1177 |
| WBC008D05_V1.3_at | GAAACACTCGCCTGAAAGGACACAT | SEQ ID NO:1178 |
| WBC008D05_V1.3_at | TTTAACACTCCACTTACACCAATGG | SEQ ID NO:1179 |
| WBC008D05_V1.3_at | TTAGGCCACAAAACAAGTCTCAATA | SEQ ID NO:118O |
| No Homology | | |
| WBC008F06_V1.3_at | ATATTTCTGATTGGTGCCTTTCCAC | SEQ ID NO:1181 |
| WBC008F06_V1.3_at | AGTTGGTTATAGTCTTCTGTTCTGA | SEQ ID NO:1182 |
| WBC008F06_V1.3_at | CAACCAGCTCGGACATTTGTGTTTT | SEQ ID NO:1183 |
| WBC008F06_V1.3_at | CATAAGCCGTTTTTCTGTTTAATGG | SEQ ID NO:1184 |
| WBC008F06_V1.3_at | GCCTTTCCACTTTTTAGCAGCAATG | SEQ ID NO:1185 |
| WBC008F06_V1.3_at | GATGTTTTCGTTCCCAAATGTGACT | SEQ ID NO:1186 |
| WBC008F06_V1.3_at | GTTATCTGCTTTCCTTCATTTTTGA | SEQ ID NO:1187 |
| WBC008F06_V1.3_at | TGTCATAAACCCCATCATAAGCCGT | SEQ ID NO:1188 |
| WBC008F06_V1.3_at | TGAAATTCTTTCATGTCCTTTCCCT | SEQ ID NO:1189 |
| WBC008F06_V1.3_at | TTTCACTCATGCCAAAACAACCAGC | SEQ ID NO:1190 |
| WBC008F06_V1.3_at | TTTGAGCCTGTTATTCGACACCATC | SEQ ID NO:1191 |
| v-ral simian leukemia | | |
| viral oncogene homolog | | |
| B (ras related; GTP | | |
| binding protein | | |
| WBC008F12_V1.3_at | AGGGCCTCTTCTCTGTTTGTTTCAG | SEQ ID NO:1192 |
| WBC008F12_V1.3_at | AGTGTGACATGGGTTCTTCTGAAGA | SEQ ID NO:1193 |
| WBC008F12_V1.3_at | AGACATCTGCTACCTCTCGTAGGAT | SEQ ID NO:1194 |
| WBC008F12_V1.3_at | AAAACCCAGTATTCAGCACATGTCC | SEQ ID NO:1195 |
| WBC008F12_V1.3_at | CTCCGAGAATTGGTTGCTGTTTAGA | SEQ ID NO:1196 |
| WBC008F12_V1.3_at | GAAGGATGCGATAAGCCGTTGCCCC | SEQ ID NO:1197 |
| WBC008F12_V1.3_at | TGCACCTGGAGCTTGAGAGGGCCTC | SEQ ID NO:1198 |
| WBC008F12_V1.3_at | GATTGCCCCGTAATTCTAAATTTAG | SEQ ID NO:1199 |
| WBC008F12_V1.3_at | GTTGTGTTCCAAAGTCCTGAAGCCA | SEQ ID NO:1200 |
| WBC008F12_V1.3_at | TGGAAAGCATCTTGTATCTCCTCCC | SEQ ID NO:1201 |
| WBC008F12_V1.3_at | TGAAGCCAGAGCCTGCGCCAGACAT | SEQ ID NO:1202 |
| Human mRNA for | | |
| complement receptor | | |
| type 1 (CR1, C3b/C4b | | |
| receptor, CD35) | | |
| WBC009B10_V1.3_at | ACTGTGTTCAGCCTCAAAGTCTGCA | SEQ ID NO:1203 |
| WBC009B10_V1.3_at | CTCATAGTCGGCATATTCTTCGGTA | SEQ ID NO:1204 |
| WBC009B10_V1.3_at | CTTCGTTCTCTGGATTTGTCTGTAT | SEQ ID NO:1205 |
| WBC009B10_V1.3_at | CTGGTTTCCTCCAATGAACTGCTTA | SEQ ID NO:1206 |
| WBC009B10_V1.3_at | GCTTACAGCCCCAGCAAGAGAGGAA | SEQ ID NO:1207 |
| WBC009B10_V1.3_at | GCAATTCCTCTGTTATTTCCTAATA | SEQ ID NO:1208 |
| WBC009B10_V1.3_at | GTATGATCTTCTTTATTGTACCCAT | SEQ ID NO:1209 |
| WBC009B10_V1.3_at | GTGATTATCCATTTACATCCCCAAC | SEQ ID NO:1210 |
| WBC009B10_V1.3_at | TACATCCCCAACAAGGCAACTGTGT | SEQ ID NO:1211 |
| WBC009B10_V1.3_at | TAGTTTCCACGTCCCAAATTGCAAT | SEQ ID NO:1212 |
| WBC009B10_V1.3_at | TTGTACCCATCATTATTTCCTGTTG | SEQ ID NO:1213 |
| Down-regulator of | | |
| transcription 1, TBP- | | |
| binding (negative | | |
| cofactor 2) | | |
| WBC009E12_V1.3_at | ATTAAATACATTTCTCCCATGCCAC | SEQ ID NO:1214 |
| WBC009E12_V1.3_at | AGGATAGATTTCAGCTCCCAGGATC | SEQ ID NO:1215 |
| WBC009E12_V1.3_at | AGTGTTGGACTTCTTAATGATCATA | SEQ ID NO:1216 |
| WBC009E12_V1.3_at | AGCTCCCAGGATCCCAATTTTAATT | SEQ ID NO:1217 |
| WBC009E12_V1.3_at | AATTTCTGTATTCACCAAGCCCAAG | SEQ ID NO:1218 |
| WBC009E12_V1.3_at | GACATTCTTGTGATTTCATATGCTG | SEQ ID NO:1219 |
| WBC009E12_V1.3_at | GTTCGAAGCCTGGTGACTTTTCATT | SEQ ID NO:1220 |
| WBC009E12_V1.3_at | GTAATCTAAATTCCTGTGTCAGTTG | SEQ ID NO:1221 |
| WBC009E12_V1.3_at | GTACTGTAACATCCTTATACTTTAT | SEQ ID NO:1222 |
| WBC009E12_V1.3_at | GTGTTGGCTTTTCTAATTTGTACTG | SEQ ID NO:1223 |
| WBC009E12_V1.3_at | GTGTCAGTTGCCAAATCACTTAAAT | SEQ ID NO:1224 |
| 3-hydroxy-3-methyl- | | |
| glutaryl-Coenzyme A | | |
| synthase 1 (soluble) | | |
| WBC010F04_V1.3_at | ATGACATGAGCCTTATAGACTGTAA | SEQ ID NO:1225 |
| WBC010F04_V1.3_at | AGTCCATTGCCAGCAGTGGGCAGGC | SEQ ID NO:1226 |
| WBC010F04_V1.3_at | AATTACTTCATTTTAACATCCACTG | SEQ ID NO:1227 |
| WBC010F04_V1.3_at | CACCTTATTAACTGTGAGGTCATAA | SEQ ID NO:1228 |
| WBC010F04_V1.3_at | GCAGGCCTGGCATTATTGGCACAGA | SEQ ID NO:1229 |
| WBC010F04_V1.3_at | GAGCATTAACTGTGCACCTTATTAA | SEQ ID NO:1230 |
| WBC010F04_V1.3_at | GATCTCTTTGGTGCTGAACTATGAC | SEQ ID NO:1231 |
| WBC010F04_V1.3_at | GGGTGTCAGGAAATGGGTATTCTCA | SEQ ID NO:1232 |
| WBCQ10F04_V1.3_at | GGTATTCTCAAAGTCCATTGCCAGC | SEQ ID NO:1233 |
| WBC010F04_V1.3_at | TAAAGCATTTTCTCCGACTTTCACC | SEQ ID NO:1234 |
| WBC010F04_V1.3_at | TAGACAGTTTTGTAGATCTCTTTGG | SEQ ID NO:1235 |
| Pinin, desmosome | | |
| associated protein | | |
| (PNN) | | |
| WBC012E07_V1.3_at | AATCAGATCTTTGCAGCTTTGAGGG | SEQ ID NO:1236 |
| WBC012E07_V1.3_at | AATTTGGTTGGCATTTTCTTCATGA | SEQ ID NO:1237 |
| WBC012E07_V1.3_at | CTTTTGTGTTGGCTCTAACTCTGAA | SEQ ID NO:1238 |
| WBC012E07_V1.3_at | CCTCCTCATCTTTAAACCACGTATT | SEQ ID NO:1239 |
| WBC012E07_V1.3_at | GAGCATCATTCTTTTGTCTCCATGG | SEQ ID NO:1240 |
| WBC012E07_V1.3_at | GTTTCCTCACTTTTATTTGCCTTAG | SEQ ID NO:1241 |
| WBC012E07_V1.3_at | GTCTCCATGGTTACTTGTGTGATAC | SEQ ID NO:1242 |
| WBC012E07_V1.3_at | GTGGTCTTGTCTTAACTTTTGTGTT | SEQ ID NO:1243 |
| WBC012E07_V1.3_at | GGAGTATCTGTTGCCCATTACTATA | SEQ ID NO:1244 |
| WBC012E07_V1.3_at | TACTGTTTTTTCTAATCTCCCTTGT | SEQ ID NO:1245 |
| WBC012E07_V1.3_at | TTTAATCTAAGCATTTTCCCCTCCT | SEQ ID NO:1246 |
| Complement component 5 | | |
| receptor 1 (C5a | | |
| ligand) | | |
| WBC012F07_V1.3_at | GAAACAACCAGGAGCCCGTACGGAG | SEQ ID NO:1247 |
| WBC012F07_V1.3_at | ATATCAGCTGCCTAGAATCCGGACG | SEQ ID NO:1248 |
| WBC012F07_V1.3_at | ACATCGACACTTCCTTCTAGAGAGA | SEQ ID NO:1249 |
| WBC012F07_V1.3_at | GACGCGGTCTAACCCTGTTGAGAAA | SEQ ID NO:1250 |
| WBC012F07_V1.3_at | GGGAAAATCTGACTTACTCCTTTGT | SEQ ID NO:1251 |
| WBC012F07_V1.3_at | GGAAGCTACACTGAAGACCGAGGTT | SEQ ID NO:1252 |
| WBC012F07_V1.3_at | GGACCTACCCAAGCTTTTGTAAGTG | SEQ ID NO:1253 |
| WBC012F07_V1.3_at | GGCAATATTGGTTGGGTCCCTGCAG | SEQ ID NO:1254 |
| WBC012F07_V1.3_at | TCCACCCACGGACTTTGAGAAACAA | SEQ ID NO:1255 |
| WBC012F07_V1.3_at | TGCGCGAGCAGAGCCCACGAATAGA | SEQ ID NO:1256 |
| WBC012F07_V1.3_at | TAGAGAGACCCAACCATTCTTTCCA | SEQ ID NO:1257 |
| Soc2 suppressor of | | |
| clear homolog (C. | | |
| elegans) | | |
| WBC012G02_V1.3_at | CTTGACGCTCAAATTCAGGACTGAA | SEQ ID NO:1258 |
| WBC012G02_V1.3_at | ATATCCTTTCTTCTTTTTTCCATCT | SEQ ID NO:1259 |
| WBC012G02_V1.3_at | CAGTATTGTAAATGTGTGCCCCTTA | SEQ ID NO:1260 |
| WBC012G02_V1.3_at | CGTATTGCTGCTTGGTTTTCTTTTT | SEQ ID NO:1261 |
| WBC012G02_V1.3_at | GCGGGTGCATTCTAGATATCATTCT | SEQ ID NO:1262 |
| WBC012G02_V1.3_at | GAGACTCACAGAGCGGGTGCATTCT | SEQ ID NO:1263 |
| WBC012G02_V1.3_at | GATAGATTTTCTTTTGCTTTACTGC | SEQ ID NO:1264 |
| WBC012G02_V1.3_at | GTTATTTTGCTTTTCTTGACGCTCA | SEQ ID NO:1265 |
| WBC012G02_V1.3_at | GTACTCTTACTTTTGGTAGTGTCAG | SEQ ID NO:1266 |
| WBC012G02_V1.3_at | GTGTGCCCCTTATACAGTACTCTTA | SEQ ID NO:1267 |
| WBC012G02_V1.3_at | TTTTCCATCTACTGTGGCTTTTCAG | SEQ ID NO:1268 |
| Sialyltransferase 1 | | |
| (beta-galactoside | | |
| alpha-2, 6- | | |
| sialyltransferase) | | |
| transcript variant 2 | | |
| WBC013A09_V1.3_at | AGCTCAGGCCCGATCTGCTTGGGAA | SEQ ID NO:1269 |
| WBC013A09_V1.3_at | AGCCCATCTCTCTGAAGGGATTTAT | SEQ ID NO:1270 |
| WBC013A09_V1.3_at | AATTCCTGGCTCTCTTTATGTTCTG | SEQ ID NO:1271 |
| WBC013A09_V1.3_at | GCCGCTTACTGCTGCGTGAACTAAT | SEQ ID NO:1272 |
| WBC013A09_V1.3_at | GAATTGCAGGAAAGCCCATCTCTCT | SEQ ID NO:1273 |
| WBC013A09_V1.3_at | GAAGGTGGCATTCCATCAGCAGAAG | SEQ ID NO:1274 |
| WBC013A09_V1.3_at | GTAGCCATCTATTCAGCCTATATCA | SEQ ID NO:1275 |
| WBC013A09_V1.3_at | GTGAACTAATCTTTTCCACCTCTCT | SEQ ID NO:1276 |
| WBC013A09_V1.3_at | TGGTGTGGGACCCTGAGACTACACT | SEQ ID NO:1277 |
| WBC013A09_V1.3_at | TCATGATATCCTCTAATCCTTCCAA | SEQ ID NO:1278 |
| WBC013A09_V1.3_at | TTAATTCTGTGCTCTCTCTATATGG | SEQ ID NO:1279 |
| Ras GTPase-activating- | | |
| like protein (IQGAP1) | | |
| WBC013C03_V1.3_at | AGCCTCCACTTTCTCTGATGTGTTG | SEQ ID NO:1280 |
| WBC013C03_V1.3_at | AGCCGACGCTGTTACACTTGATATT | SEQ ID NO:1281 |
| WBC013C03_V1.3_at | ACTAGGATTTATCTGCAGGGTTGCA | SEQ ID NO:1282 |
| WBC013C03_V1.3_at | AATCTGTTTTCCCTCATTTCTTTCT | SEQ ID NO:1283 |
| WBC013C03_V1.3_at | GAATCCTGCCTGAAATAGACTCAAA | SEQ ID NO:1284 |
| WBC013C03_V1.3_at | GAGCTCCAGTTTTATGGGTTTAGTC | SEQ ID NO:1285 |
| WBC013C03_V1.3_at | GATGTGTTGGTTCAGTTTTCTTTTA | SEQ ID NO:1286 |
| WBC013C03_V1.3_at | GTGCCTTTATTTTTATGAGCTCCAG | SEQ ID NO:1287 |
| WBC013C03_V1.3_at | GGGCTTATCTGTATATCTGAACTCT | SEQ ID NO:1288 |
| WBC013C03_V1.3_at | TTGAAATCATGCTGCTGAGCCTCCA | SEQ ID NO:1289 |
| WBC013C03_V1.3_at | TTGCTGCCCACATGGTGCCTTTATT | SEQ ID NO:1290 |
| Homo sapiens cDNA | | |
| FLJ45679 fis, clone | | |
| ERLTF2001835 | | |
| WBC013E10_V1.3_at | AGAGGATCTCTCTTTTGAAAAGCTA | SEQ ID NO:1291 |
| WBC013E10_V1.3_at | AAGAACACTTACAGCTCATATACAG | SEQ ID NO:1292 |
| WBC013E10_V1.3_at | AAGGAGTTTCCTGTGGTTTCTGCCG | SEQ ID NO:1293 |
| WBC013E10_V1.3_at | CGACTATTACTTTCTCTCAAGTGCC | SEQ ID NO:1294 |
| WBC013E10_V1.3_at | GAATATGTTCTCCTTTGTAGCCTCT | SEQ ID NO:1295 |
| WBC013E10_V1.3_at | GAAAAACACAGCTTAGCCCCTTCCT | SEQ ID NO:1296 |
| WBC013E10_V1.3_at | GTAGAATGACACCAAAGCTGCAACT | SEQ ID NO:1297 |
| WBC013E10_V1.3_at | GGAAATCAGTCAGTACCATCGTTAA | SEQ ID NO:1298 |
| WBC013E10_V1.3_at | TTGTAGCCTCTTGACAAAGCAGGAA | SEQ ID NO:1299 |
| WBC013E10_V1.3_at | TTGTCCACTGAAACTTTGCTAACGT | SEQ ID NO:1300 |
| WBC013E10_V1.3_at | TTCCTCTAGCCTTCAGTCAATTTTT | SEQ ID NO:1301 |
| WBC013G08_V1.3_at | AGTAAATTGACAGTGGAGCTCCATT | SEQ ID NO:1302 |
| WBC013G08_V1.3_at | AGGCATGTACACTTTGATATAGCAG | SEQ ID NO:1303 |
| WBC013G08_V1.3_at | AATGCCTGGCCCATGTTACATAGAA | SEQ ID NO:1304 |
| WBC013G08_V1.3_at | CAGTGGAGCTCCATTTTACAAATGT | SEQ ID NO:1305 |
| WBC013G08_V1.3_at | GTTCAGGCATTGCTTTAAACGATGA | SEQ ID NO:1306 |
| WBC013G08_V1.3_at | GAATACGTCTGGAATGATCCATTAG | SEQ ID NO:1307 |
| WBC013G08_V1.3_at | GATATAGCAGGTTCACCTTAGGAAA | SEQ ID NO:1308 |
| WBC013G08_V1.3_at | GTGCAGTCTTACATGTGTACACATA | SEQ ID NO:1309 |
| WBC013G08_V1.3_at | GGAAGACTATGTAGCCAGCAAGTAA | SEQ ID NO:1310 |
| WBC013G08_V1.3_at | TGAATTTAACACATCCATATACTGG | SEQ ID NO:1311 |
| WBC013G08_V1.3_at | TAGAGGGTATCAATGCCTGGCCCAT | SEQ ID NO:1312 |
| RAB6 interacting | | |
| protein 1 (RAB6IP1) | | |
| WBC013H03_V1.3_at | TTCCCAAAGGGACTTCAGCGAGTTG | SEQ ID NO:1313 |
| WBC013H03_V1.3_at | ACTGAGCCTGCGGTTGCACAGAAGT | SEQ ID NO:1314 |
| WBC013H03_V1.3_at | GAAACCAGCTACAGTATGGCCCACT | SEQ ID NO:1315 |
| WBC013H03_V1.3_at | GCTTATTTTGAAGCTGGCGCCCTCC | SEQ ID NO:1316 |
| WBC013H03_V1.3_at | CCCTCCATTGTGTGTTTTAAGTCTT | SEQ ID NO:1317 |
| WBC013H03_V1.3_at | GAAAAGCTTGTCACAGTCTAACTGG | SEQ ID NO:1318 |
| WBC013H03_V1.3_at | GAGACGAGGTTGGTGCCGCTTATTT | SEQ ID NO:1319 |
| WBC013H03_V1.3_at | GAGAGGAAATGTACACTCACTGTAA | SEQ ID NO:1320 |
| WBC013H03_V1.3_at | GATTTGCTTTTTACACACTTTCATG | SEQ ID NO:1321 |
| WBC013H03_V1.3_at | GTATTATTTATTTAACCCTCCATTG | SEQ ID NO:1322 |
| WBC013H03_V1.3_at | GGACCGAGAGAGACTCACCCTGCAG | SEQ ID NO:1323 |
| RTN4-C (RTN4) | | |
| WBC014G08_V1.3_at | ATAGAACTCTTCACGTCGACTGCAT | SEQ ID NO:1324 |
| WBC014G08_V1.3_at | AGGTGCACTACCATCTGTTTTCAAC | SEQ ID NO:1325 |
| WBC014G08_V1.3_at | AACTTGCCTTTCTGGTATGTTCTAG | SEQ ID NO:1326 |
| WBC014G08_V1.3_at | AACCCTTTTCACAGTTTGTGCACTG | SEQ ID NO:1327 |
| WBC014G08_V1.3_at | AAGCTTAGAGACCTTTACCTTCCAG | SEQ ID NO:1328 |
| WBC014G08_V1.3_at | CAAACTCTGACTCTGTGGACTGAAT | SEQ ID NO:1329 |
| WBC014G08_V1.3_at | CCCACAGTGCTTGATCTTTCAGAGA | SEQ ID NO:1330 |
| WBC014G08_V1.3_at | GACTGCATCGCACAGACTTGCTATA | SEQ ID NO:1331 |
| WBC014G08_V1.3_at | GACGCCATGCACATAGAACTCTTCA | SEQ ID NO:1332 |
| WBC014G08_V1.3_at | GAGAGTCTTTGGTTGTACGTGTGTA | SEQ ID NO:1333 |
| WBC014G08_V1.3_at | GTTTTCAACGTGAACCGACGCCATG | SEQ ID NO:1334 |
| Homo sapiens mRNA; | | |
| cDNA DKFZp564C012 | | |
| WBC014H06_V1.3_at | CTAACATTTGTATGGACCCCTTCAT | SEQ ID NO:1335 |
| WBC014H06_V1.3_at | CAGCAGGACTGATTGCCGGGTGCAA | SEQ ID NO:1336 |
| WBC014H06_V1.3_at | ACCGTTTTTGTCCTAATGCTTCTGT | SEQ ID NO:1337 |
| WBC014H06_V1.3_at | ACCTCTCTGCCAAACGTGATCTTAA | SEQ ID NO:1338 |
| WBC014H06_V1.3_at | AAATCACACCATCCAGACTGACAAT | SEQ ID NO:1339 |
| WBC014H06_V1.3_at | AACAACTCTCTTTTTGGCAGCAACT | SEQ ID NO:1340 |
| WBC014H06_V1.3_at | AAGCCACACCGTCGTCTGTGAGAAA | SEQ ID NO:1341 |
| WBC014H06_V1.3_at | CTTTGCTCCATTTCATTTTGCCAGA | SEQ ID NO:1342 |
| WBC014H06_V1.3_at | GAGAAAGTGCGCCTCCTTAAAGGGT | SEQ ID NO:1343 |
| WBC014H06_V1.3_at | GCTTCTGTTTTATGTGGTGATCGCA | SEQ ID NO:1344 |
| WBC014H06_V1.3_at | TAAAGTGTTCGTTGTGGTGGCCGTC | SEQ ID NO:1345 |
| No homology | | |
| WBC016A12_V1.3_at | ATGCAGATCAGATGGCGTTTCTCCC | SEQ ID NO:1346 |
| WBC016A12_V1.3_at | ACGTGTTCAGACTTGTGTTTTCATA | SEQ ID NO:1347 |
| WBC016A12_V1.3_at | AAGTATGGGCTGTTTCACGTGTTCA | SEQ ID NO:1348 |
| WBC016A12_V1.3_at | GACTATGTACTGTCCACCTGCATTA | SEQ ID NO:1349 |
| WBC016A12_V1.3_at | GATTGATTTCCTACTAGTCTTTGAC | SEQ ID NO:1350 |
| WBC016A12_V1.3_at | GTTTCTCCCAGCTCAGTGGATTTTC | SEQ ID NO:1351 |
| WBC016A12_V1.3_at | GGAGCCTGGCTTATTTGATTGATTT | SEQ ID NO:1352 |
| WBC016A12_V1.3_at | GGAAGTCCCTGTTCTGACTATGTAC | SEQ ID NO:1353 |
| WBC016A12_V1.3_at | TCCCTTCATTCTGGTTTCCATGTGA | SEQ ID NO:1354 |
| WBC016A12_V1.3_at | TCACCAACTCCCTTTTGGATTTCAT | SEQ ID NO:1355 |
| WBC016A12_V1.3_at | TAAACAACCATGTCTGCATCTAGGG | SEQ ID NO:1356 |
| Homo sapiens gene for | | |
| JKTBP2, JKTBP1 | | |
| (alternative | | |
| splicing). | | |
| WBC018B01_V1.3_s_at | ATAGCTGCCAATTAGTTTTCTTTGT | SEQ ID NO:1357 |
| WBC018B01_V1.3_s_at | AGGCACAACTGTGTCCAACTGTATA | SEQ ID NO:1358 |
| WBC018B01_V1.3_s_at | AACCCATCTTGCAGGACGACATTGA | SEQ ID NO:1359 |
| WBC018B01_V1.3_s_at | GAAGATTGGTCTTCTGTTGATCTAA | SEQ ID NO:1360 |
| WBC018B01_V1.3_s_at | GACTTTCTAGTGTACAAGGCACAAC | SEQ ID NO:1361 |
| WBC018B01_V1.3_s_at | GACTCAATGTGGATTTGTGTTTATA | SEQ ID NO:1362 |
| WBC018B01_V1.3_s_at | GTTTTTACTTTGTCCTTTGCTATCT | SEQ ID NO:1363 |
| WBC018B01_V1.3_s_at | GTGTCCAACTGTATATAGCTGCCAA | SEQ ID NO:1364 |
| WBC018B01_V1.3_s_at | GGAGATTGCTAAAGTAACCCATCTT | SEQ ID NO:1365 |
| WBC018B01_V1.3_s_at | TGCTATCTGTGTTATGACTCAATGT | SEQ ID NO:1366 |
| WBC018B01_V1.3_s_at | TTTGTCCTTTGCTATCTGTGTTATG | SEQ ID NO:1367 |
| Predicted: Mitogen- | | |
| activated protein | | |
| kinase kinase kinase 1 | | |
| (MAP3K1) | | |
| WBC018D05_V1.3_at | GACTTCCAGGGCTTAAGGGCTAACT | SEQ ID NO:1368 |
| WBC018D05_V1.3_at | ATTTGCTGTGTGACTATGATTCCTA | SEQ ID NO:1369 |
| WBC018D05_V1.3_at | CAAACTGCCTCTAGATGTCCAAATC | SEQ ID NO:1370 |
| WBC018D05_V1.3_at | CTCAGCTCGCTGGTAATTGTGGTGT | SEQ ID NO:1371 |
| WBC018D05_V1.3_at | GAGGAACCTCAGCTAATCAGTATTA | SEQ ID NO:1372 |
| WBC018D05_V1.3_at | GTATTACTTGTAGATCCCCATGCCA | SEQ ID NO:1373 |
| WBC018D05_V1.3_at | GTTTGAGTTTGTTTGCAGTTCCCTC | SEQ ID NO:1374 |
| WBC018D05_V1.3_at | TCAGGTGTCCTATAGATTTTTCTTC | SEQ ID NO:1375 |
| WBC018D05_V1.3_at | TAACGTCTACTGCTGTTTATTCCAG | SEQ ID NO:1376 |
| WBC018D05_V1.3_at | TTTACCCCATCGAACCATTTTATAG | SEQ ID NO:1377 |
| WBC018D05_V1.3_at | TTTATTCCAGTTTCTACTACCTCAG | SEQ ID NO:1378 |
| Homo sapiens mRNA; | | |
| cDNA DKFZp686M2414 | | |
| WBC019B05_V1.3_at | ATATATGCTGTCTGTTTTGTGTACA | SEQ ID NO:1379 |
| WBC019B05_V1.3_at | AACTCACTCTTACAGTAGTCTGCTT | SEQ ID NO:1380 |
| WBC019B05_V1.3_at | AATGTTGTCTTTTAAATACTCCGAT | SEQ ID NO:1381 |
| WBC019B05_V1.3_at | CAAGCCATTTGTGGGAATCCTAAAA | SEQ ID NO:1382 |
| WBC019B05_V1.3_at | CCAGCTGTTTATTTTATTGAGTCCT | SEQ ID NO:1383 |
| WBC019B05_V1.3_at | GAGTAACAAACTCAGCCTTCTGTAA | SEQ ID NO:1384 |
| WBC019B05_V1.3_at | GAGGATCATCTGACTTTTCACTTAC | SEQ ID NO:1385 |
| WBC019B05_V1.3_at | GTAGTCTGCTTATTTCCAGCTGTTT | SEQ ID NO:1386 |
| WBC019B05_V1.3_at | GTGCTTTATGTACTGTTATCCTATA | SEQ ID NO:1387 |
| WBC019B05_V1.3_at | TGTAAAAACTCCTTTTCTGCCACAC | SEQ ID NO:1388 |
| WBC019B05_V1.3_at | TTGGGTTTTCTTTTCAACTCACTCT | SEQ ID NO:1389 |
| No homology | | |
| WBC020B04_V1.3_at | ATATTGGGCTTTGTCAGTCTTCTGA | SEQ ID NO:1390 |
| WBC020B04_V1.3_at | ATGACAGCTTTTTCTAACGGACAAA | SEQ ID NO:1391 |
| WBC020B04_V1.3_at | AGGATACTCCGTTCTGTAGACACAG | SEQ ID NO:1392 |
| WBC020B04_V1.3_at | ACTCAATTCTGCTGTTGTCGCACAA | SEQ ID NO:1393 |
| WBC020B04_V1.3_at | CAAATTTCCCTTCTTCTGGCTAATT | SEQ ID NO:1394 |
| WBC020B04_V1.3_at | CTGCCGTCACTGTCATGTTCTAAAT | SEQ ID NO:1395 |
| WBC020B04_V1.3_at | GTCAGATCAGACTCCTGTTACAGCT | SEQ ID NO:1396 |
| WBC020B04_V1.3_at | GGATGTTTTATCTGAACGCCTGCTC | SEQ ID NO:1397 |
| WBC020B04_V1.3_at | TGGCTAATTCCTACACTTTTTCTCA | SEQ ID NO:1398 |
| WBC020B04_V1.3_at | TAAGGTCCACCACTTGTTCTTTGTT | SEQ ID NO:1399 |
| WBC020B04_V1.3_at | TAAGAGCTCTCTAACACTGGCTGCT | SEQ ID NO:1400 |
| Hypothetical protein | | |
| FLJ20481 | | |
| WBC021B08_V1.3_at | ATAGCTCAGGGCGATTCTGTGTCGT | SEQ ID NO:1401 |
| WBC021B08_V1.3_at | AACATACTTAGACCTCCAGACGAGC | SEQ ID NO:1402 |
| WBC021B08_V1.3_at | AGCATTATCAACACCTAGAGCTTAA | SEQ ID NO:1403 |
| WBC021B08_V1.3_at | AACGCGTGGCTCTTTCTTGAAATTG | SEQ ID NO:1404 |
| WBC021B08_V1.3_at | AAAGTTTTGCCCTGAAGCATCCAGA | SEQ ID NO:1405 |
| WBC021B08_V1.3_at | AATCGTGAAGAGAGCGCCTCAGACA | SEQ ID NO:1406 |
| WBC021B08_V1.3_at | GCAACTCCCTCATTCACAAGTAATA | SEQ ID NO:1407 |
| WBC021B08_V1.3_at | GACAGTACATTTTCCCAGCAAAGTG | SEQ ID NO:1408 |
| WBC021B08_V1.3_at | GAGCCATGTGTTTTCACTGCCAAAA | SEQ ID NO:1409 |
| WBC021B08_V1.3_at | GGTCTCACTTAGTTATTGATCAGCA | SEQ ID NO:1410 |
| WBC021B08_V1.3_at | TATTGTGCTGTCCTGATTGGTTTAC | SEQ ID NO:1411 |
| No homology | | |
| WBC021D01_V1.3_at | CGTTCTCCGGTCTGTAGCGATTTGA | SEQ ID NO:1412 |
| WBC021D01_V1.3_at | AAGAAGTAAGCAGCACCCGTTCTCC | SEQ ID NO:1413 |
| WBC021D01_V1.3_at | AGGCGCCTGTGCCAGATTATAATCA | SEQ ID NO:1414 |
| WBC021D01_V1.3_at | AGTGACACACTTAGCTTTCTTTCTG | SEQ ID NO:1415 |
| WBC021D01_V1.3_at | AAGCTCACTCTTTCATGTTGGATGG | SEQ ID NO:1416 |
| WBC021D01_V1.3_at | CTGCCCTCCATCTTAACTTTTATTA | SEQ ID NO:1417 |
| WBC021D01_V1.3_at | GAAACTTGTCCTTATTCATTGTTGT | SEQ ID NO:1418 |
| WBC021D01_V1.3_at | GGATCACAAATCGTTCATAGACCAT | SEQ ID NO:1419 |
| WBC021D01_V1.3_at | TAATCAACACATCGCTTCCTTTATC | SEQ ID NO:1420 |
| WBC021D01_V1.3_at | TTTCACACAAGTTACAACTGCCCTC | SEQ ID NO:1421 |
| WBC021D01_V1.3_at | TTTCTTTCTGGCACAAGCTCACTCT | SEQ ID NO:1422 |
| Toll-like receptor 8 | | |
| (TLR8) | | |
| WBC022B05_V1.3_at | TCCCAAACTTTCTACGATGCTTACG | SEQ ID NO:1423 |
| WBC022B05_V1.3_at | AAAGACGCCTCTGTTACGGACTGGG | SEQ ID NO:1424 |
| WBC022B05_V1.3_at | ATTCCCAGTATTTGCGGCTGCGGCA | SEQ ID NO:1425 |
| WBC022B05_V1.3_at | ATTGGGACCCGGGATTAGCCATCAT | SEQ ID NO:1426 |
| WBC022B05_V1.3_at | AAAAGGCTACAGGTCTCTTTCCACA | SEQ ID NO:1427 |
| WBC022B05_V1.3_at | AAACAGCATTCTACTTGGCCTTGCA | SEQ ID NO:1428 |
| WBC022B05_V1.3_at | GAGCCAGTGTTACAGCATTCCCAGT | SEQ ID NO:1429 |
| WBC022B05_V1.3_at | GATGCTTACGTTTCTTATGACACCA | SEQ ID NO:1430 |
| WBC022B05_V1.3_at | GATTGTATTTATTCTGCTGGAGCCA | SEQ ID NO:1431 |
| WBC022B05_V1.3_at | TGATAAATGAGCTGCGCTTCCACCT | SEQ ID NO:1432 |
| WBC022B05_V1.3_at | TTAGCCATCATCGATAACCTCATGC | SEQ ID NO:1433 |
| Immunoglobulin | | |
| superfamily, member | | |
| 6 variant | | |
| WBC022B06_V1.3_at | AATAAGCCACAACCGACTCTAGATG | SEQ ID NO:1434 |
| WBC022B06_V1.3_at | AAAATCACTTACATCATGCCGCCAA | SEQ ID NO:1435 |
| WBC022B06_V1.3_at | AAGTGCCCACATTTGAGTCAGCGAA | SEQ ID NO:1436 |
| WBC022B06_V1.3_at | AAGGCGCCTCTGCAATACTGATTTT | SEQ ID NO:1437 |
| WBC022B06_V1.3_at | AATCATCTTGAAAACTACCTTGGAG | SEQ ID NO:1438 |
| WBC022B06_V1.3_at | CAAACGATTCCTCTGGTATTGCCAT | SEQ ID NO:1439 |
| WBC022B06_V1.3_at | CTCTAGATGTCAGTGTTGTGCCAAA | SEQ ID NO:1440 |
| WBC022B06_V1.3_at | GTGATGGGCCAGTCAGACTAAGCTG | SEQ ID NO:1441 |
| WBC022B06_V1.3_at | GGTATAGTGCACATTTTCCTGCCAG | SEQ ID NO:1442 |
| WBC022B06_V1.3_at | TTTCCTGCCAGGGTATACAAAATCA | SEQ ID NO:1443 |
| WBC022B06_V1.3_at | TAGGAGTGGGCAAGGCACCGTCCTT | SEQ ID NO:1444 |
| Phosphogluconate | | |
| dehydrogenase | | |
| WBC022F08_V1.3_at | ATGCCTAATCAGACTCCTTGTGTTA | SEQ ID NO:1445 |
| WBC022F08_V1.3_at | ATGCAGGTGAATTCCCTTTTTCCTC | SEQ ID NO:1446 |
| WBC022F08_V1.3_at | AGGCAGCAGCTCCTATCACATAGAT | SEQ ID NO:1447 |
| WBC022F08_V1.3_at | AGTGTGTCATCCTCTTCGTACAATG | SEQ ID NO:1448 |
| WBC022F08_V1.3_at | ACCCGGACAGTTTATCCACACTAAT | SEQ ID NO:1449 |
| WBC022F08_V1.3_at | ACTGCTCTTTCCTTCTATGATGGAT | SEQ ID NO:1450 |
| WBC022F08_V1.3_at | CTTGTCTCTTGGGACTGACCAGGAA | SEQ ID NO:1451 |
| WBC022F08_V1.3_at | CTATTTTCTGCTCACATCTCTTAAA | SEQ ID NO:1452 |
| WBC022F08_V1.3_at | GATGGCGCAAACCAGCTGCCTGAAG | SEQ ID NO:1453 |
| WBC022F08_V1.3_at | GTATGAACTCTTAGCCAAACCCGGA | SEQ ID NO:1454 |
| WBC022F08_V1.3_at | TAGACCAGGACATTCCATTTGCCAC | SEQ ID NO:1455 |
| Adducin 3 (gamma) | | |
| (ADD3), transcript | | |
| variant 2 | | |
| WBC024B05_V1.3_at | ATGAACCTCTGTGTCCTGTGGAAAA | SEQ ID NO:1456 |
| WBC024B05_V1.3_at | ATGAGCCAATGAACCTCTGTGTCCT | SEQ ID NO:1457 |
| WBC024B05_V1.3_at | AGTGAACTATTTGCACCTTTTGCTA | SEQ ID NO:1458 |
| WBC024B05_V1.3_at | CACCTTTTGCTAATGCCTCTATTTA | SEQ ID NO:1459 |
| WBC024B05_V1.3_at | CAGTGTTTTAATCTCTTAGTGGAAA | SEQ ID NO:1460 |
| WBC024B05_V1.3_at | CTGGTTCTGTTTGGCGTATGTGTAT | SEQ ID NO:1461 |
| WBC024B05_V1.3_at | GCCTCTATTTACTTGCTTTGGCATA | SEQ ID NO:1462 |
| WBC024B05_V1.3_at | GATCTCACTAACTACTGGAATCAGT | SEQ ID NO:1463 |
| WBC024B05_V1.3_at | GTAACCTGTGAACTATGCTTTTCCA | SEQ ID NO:1464 |
| WBC024B05_V1.3_at | GGAAACTCTCAGTTGCTTAATTCTG | SEQ ID NO:1465 |
| WBC024B05_V1.3_at | GGAAATTTCATTTTAGATCTCACTA | SEQ ID NO:1466 |
| No homology | | |
| WBC024C11_V1.3_at | ATGTCTATTTCATGCCTACGCTTAA | SEQ ID NO:1467 |
| WBC024C11_V1.3_at | AGACCATACAGTTTTATCCCACAAG | SEQ ID NO:1468 |
| WBC024C11_V1.3_at | CCTGCCTCGTGGTTTCTCTAGAAAA | SEQ ID NO:1469 |
| WBC024C11_V1.3_at | GTTTACCTGGGCTTGGAATTCTAGA | SEQ ID NO:1470 |
| WBC024C11_V1.3_at | GATCTGACTCTGAAATTTCCTTTAG | SEQ ID NO:1471 |
| WBC024C11_V1.3_at | GTTTTTCACTCTAATCTGCATTCCC | SEQ ID NO:1472 |
| WBC024C11_V1.3_at | TTTTCCCCAGGCTGCTTGTAAGATC | SEQ ID NO:1473 |
| WBC024C11_V1.3_at | TAGTCCTTTCTTCTGGTTAACTAAT | SEQ ID NO:1474 |
| WBC024C11_V1.3_at | TCACATCATATATTGCCTCTTTCCT | SEQ ID NO:1475 |
| WBC024C11_V1.3_at | TAGTTATCCTGTCTTTTTTCCCCAG | SEQ ID NO:1476 |
| WBC024C11_V1.3_at | TATAAGTGGTAGACACCTCCTGCCT | SEQ ID NO:1477 |
| No homology | | |
| WBC024C12_V1.3_at | AGGCCACATATCTCCGTCTTTTTAA | SEQ ID NO:1478 |
| WBC024C12_V1.3_at | ATATGCTTTCATTTCTCTTGTGTAA | SEQ ID NO:1479 |
| WBC024C12_V1.3_at | AAATACGCCACAATTTGTCCACTCA | SEQ ID NO:1480 |
| WBC024C12_V1.3_at | AAAACTCCTTGGGTGTGATCACGCA | SEQ ID NO:1481 |
| WBC024C12_V1.3_at | AATGTTTTCTCATATCCCTGTTATA | SEQ ID NO:1482 |
| WBC024C12_V1.3_at | GCATTTATTTGTGCTAACCTCTGAA | SEQ ID NO:1483 |
| WBC024C12_V1.3_at | GTATGTACTCTTTTGGGTCTGGTTC | SEQ ID NO:1484 |
| WBC024C12_V1.3_at | GTCTGGTTCATCCATGTTGTAGCAT | SEQ ID NO:1485 |
| WBC024C12_V1.3_at | GTGAACCTACTTAACAATCCTCGTC | SEQ ID NO:1486 |
| WBC024C12_V1.3_at | TATTCACTGTTGTCTGTTCTTCTAG | SEQ ID NO:1487 |
| WBC024C12_V1.3_at | TTAGATACCAACCTCCAAGATGCCA | SEQ ID NO:1488 |
| No homology | | |
| WBC024F08_V1.3_at | ATGTGTGTCTCTATGTACCCAAGCC | SEQ ID NO:1489 |
| WBC024F08_V1.3_at | AGCTCTGCAAGTCACTTACCTGAAG | SEQ ID NO:1490 |
| WBC024F08_V1.3_at | AGACTCAGGGATGCTGTTTCCAGCT | SEQ ID NO:1491 |
| WBC024F08_V1.3_at | AGCGTGTGTCTACATGTGTGTCTCT | SEQ ID NO:1492 |
| WBC024F08_V1.3_at | AAGCACAGTGTCTCTCGAATTTCGG | SEQ ID NO:1493 |
| WBC024F08_V1.3_at | GAGAGGCGAGCATCTGGCTGTACTT | SEQ ID NO:1494 |
| WBC024F08_V1.3_at | GTACCCTCCTCACATTTTTGCATAT | SEQ ID NO:1495 |
| WBC024F08_V1.3_at | GGTGGCCACCTGCATGAGTGTATTA | SEQ ID NO:1496 |
| WBC024F08_V1.3_at | GGATGCATTCTCTTGTTTTGCTTGA | SEQ ID NO:1497 |
| WBC024F08_V1.3_at | TGAGTCCTGTGAGATGCCCTTGTTA | SEQ ID NO:1498 |
| WBC024F08_V1.3_at | TCTGGTTCTCTCTCTCAGGAATAAG | SEQ ID NO:1499 |
| Migration-inducing | | |
| gene 10 protein | | |
| WBC026E02_V1.3_at | AGGTGGTGCCAGTTTAGAGCTCCTG | SEQ ID NO:1500 |
| WBC026E02_V1.3_at | ACTGCCACTTGCTGTGCCAAATGGA | SEQ ID NO:1501 |
| WBC026E02_V1.3_at | AAACAGTTGCACAGCATCTCAGCTC | SEQ ID NO:1502 |
| WBC026E02_V1.3_at | CAATGTTTAGTACTTTCCTGCCTTT | SEQ ID NO:1503 |
| WBC026E02_V1.3_at | GCTTTGTCATTGTTTCACTACTCAG | SEQ ID NO:1504 |
| WBC026E02_V1.3_at | GAGCTGTTAGCCTAGTTCTCTTTTT | SEQ ID NO:1505 |
| WBC026E02_V1.3_at | GAGATGCAGCACCAGGAACCCTTAA | SEQ ID NO:1506 |
| WBC026E02_V1.3_at | TGTGCGCAGCCCTTAAGTCAACTTA | SEQ ID NO:1507 |
| WBC026E02_V1.3_at | TAAGTCAACTTAGCGCTTTCCACAT | SEQ ID NO:1508 |
| WBC026E02_V1.3_at | TCAGGATCCCATTTGCATTTCTTAG | SEQ ID NO:1509 |
| WBC026E02_V1.3_at | TACTGCACTCTGGATTTGCCTACAT | SEQ ID NO:1510 |
| No homology | | |
| WBC027D07_V1.3_at | ATTTTTGTCTTTCACTCTTTTCCTG | SEQ ID NO:1511 |
| WBC027D07_V1.3_at | ATCCCTGATAATTTTCCTCACTTGG | SEQ ID NO:1512 |
| WBC027D07_V1.3_at | CACTTGGTTGTTTGCTCTGTCTGAA | SEQ ID NO:1513 |
| WBC027D07_V1.3_at | GATTAACTCTGTCTTTTAGCTGGTA | SEQ ID NO:1514 |
| WBC027D07_V1.3_at | GTAAGCCTCTTTATCATTCTCTAAT | SEQ ID NO:1515 |
| WBC027D07_V1.3_at | GTGGGTTTCCTCTAGATAGCATATA | SEQ ID NO:1516 |
| WBC027D07_V1.3_at | GGCTCTTGTTTTTTGATTCACTCTG | SEQ ID NO:1517 |
| WBC027D07_V1.3_at | TCCAGCTTTCTTTTGCCTAGTGTTA | SEQ ID NO:1518 |
| WBC027D07_V1.3_at | TATACTGTTTTCTACTGGTTGCCCT | SEQ ID NO:1519 |
| WBC027D07_V1.3_at | TAATGCCCTTCTTTATCCCTGATAA | SEQ ID NO:1520 |
| WBC027D07_V1.3_at | TATATTTTTCTCCATCCCTTTACTT | SEQ ID NO:1521 |
| No homology | | |
| WBC027E07_V1.3_at | ATAGGGTGGTGGACCTTATGGCCCA | SEQ ID NO:1522 |
| WBC027E07_V1.3_at | ATATTGAGAGTCTCCTGACCTCCAC | SEQ ID NO:1523 |
| WBC027E07_V1.3_at | AGAAAGGCCCTCAGCTGCTGGGAAT | SEQ ID NO:1524 |
| WBC027E07_V1.3_at | ACTTTGTCAAGCTCATTTCCTGGTA | SEQ ID NO:1525 |
| WBC027E07_V1.3_at | GCTGGGAATGCTTGTCCCAACTTGA | SEQ ID NO:1526 |
| WBC027E07_V1.3_at | GAGACTAGTTCTCTCGTGACACCCA | SEQ ID NO:1527 |
| WBC027E07_V1.3_at | GGCCCACATGGCCTCCAAGGAGTAA | SEQ ID NO:1528 |
| WBC027E07_V1.3_at | GGAGCCCTACCTTGTCATGTACCAT | SEQ ID NO:1529 |
| WBC027E07_V1.3_at | GGACCACCAATCACCCAGCAAGAGA | SEQ ID NO:1530 |
| WBC027E07_V1.3_at | TGACCTCCACAGTTTCCATCTCAGA | SEQ ID NO:1531 |
| WBC027E07_V1.3_at | TTGCCCTCAACGACCACTTTGTCAA | SEQ ID NO:1532 |
| Ras homolog gene | | |
| family, member A | | |
| WBC028C01_V1.3_at | AGTGGGCATCCAGTTTTTTGAAAAT | SEQ ID NO:1533 |
| WBC028C01_V1.3_at | AGTGTATGATTACTGGCCTTTTCCA | SEQ ID NO:1534 |
| WBC028C01_V1.3_at | AGATTTCATCGCATAGCTCTGGAGT | SEQ ID NO:1535 |
| WBC028C01_V1.3_at | ACACCAGGCGCTAATTCAAGGAATT | SEQ ID NO:1536 |
| WBC028C01_V1.3_at | AAAGGCCCAAGTCCGTGAGCAGCTA | SEQ ID NO:1537 |
| WBC028C01_V1.3_at | AACATGTCCTGACTGTCATCTGTCA | SEQ ID NO:1538 |
| WBC028C01_V1.3_at | GAAGTCATCTTGCTACGAGTATTTA | SEQ ID NO:1539 |
| WBC028C01_V1.3_at | GAGCTTTACTCCTTAACAGATTTCA | SEQ ID NO:1540 |
| WBC028C01_V1.3_at | GTGAGTCACCACTTCAGAGCTTTAC | SEQ ID NO:1541 |
| WBC028C01_V1.3_at | TCATCTGTCAGCTGCAAGGTACTCT | SEQ ID NO:1542 |
| WBC028C01_V1.3_at | TATTAATGATGTCCAACCCACCTGA | SEQ ID NO:1543 |
| No homology | | |
| WBC028D09_V1.3_at | AGGAGTCGGCGCACTGGGTCACCCA | SEQ ID NO:1544 |
| WBC028D09_V1.3_at | ATGAAAAGGTCCATCGCCGACAGCG | SEQ ID NO:1545 |
| WBC028D09_V1.3_at | AGAAGAAGACCAACTCTGCTCCCAA | SEQ ID NO:1546 |
| WBC028D09_V1.3_at | AAGCCGGCCTTGATTCTAGAGAGAA | SEQ ID NO:1547 |
| WBC028D09_V1.3_at | GAAGCCTCCGTGTGGAGCCATGAAA | SEQ ID NO:1548 |
| WBC028D09_V1.3_at | GAAGCTCTTCTGGAAAAGTCGGGAA | SEQ ID NO:1549 |
| WBC028D09_V1.3_at | GAAAGCTCTGTTGGCTGCACTTTTT | SEQ ID NO:1550 |
| WBC028D09_V1.3_at | GAGTCGGTCTCAAAGCCAGATGTCA | SEQ ID NO:1551 |
| WBC028D09_V1.3_at | GGGCCTCTGTTTGACGGCATTAGAA | SEQ ID NO:1552 |
| WBC028D09_V1.3_at | TAAGTCTCTGTTCACAACTCACAGC | SEQ ID NO:1553 |
| WBC028D09_V1.3_at | TTAGAAAGTTGTCCGCCGAGCTGGC | SEQ ID NO:1554 |
| Homo sapiens cDNA | | |
| FLJ13038 fis, clone | | |
| NT2RP3001272, weakly | | |
| similar to Mus | | |
| musculus mRNA for | | |
| macrophage actin- | | |
| associated-tyrosine- | | |
| phosphorylated protein | | |
| WBC028E07_V1.3_at | ATACTTGGGTCTTCCTTTTGACACT | SEQ ID NO:1555 |
| WBC028E07_V1.3_at | AGTGGCAGCTTCTTGTTATGACAGA | SEQ ID NO:1556 |
| WBC028E07_V1.3_at | AAATATTTTCCTGACCTGCTCTGTG | SEQ ID NO:1557 |
| WBC028E07_V1.3_at | CAGCACTGGCACTTATTTGGTATGT | SEQ ID NO:1558 |
| WBC028E07_V1.3_at | GAAGATTGATTATTCCCTCCTTTTA | SEQ ID NO:1559 |
| WBC028E07_V1.3_at | GTGTTAATCTTACCCTTTCTCAAAT | SEQ ID NO:1560 |
| WBC028E07_V1.3_at | GGAGACCGTGTACTTTTTGTGCAAC | SEQ ID NO:1561 |
| WBC028E07_V1.3_at | TGCTCTGTGCATAGCTTACCCAGAA | SEQ ID NO:1562 |
| WBC028E07_V1.3_at | TTTATTGTTGGCACTTCCTCAGGGA | SEQ ID NO:1563 |
| WBC028E07_V1.3_at | TTTCTCCCTATTGGTCAGTGTGATT | SEQ ID NO:1564 |
| WBC028E07_V1.3_at | TTGACTTCCCCAAACTGAACAGGCT | SEQ ID NO:1565 |
| No homology | | |
| WBC028F05_V1.3_at | AGATGTCTTCCTTCTCAATTTTGAG | SEQ ID NO:1566 |
| WBC028F05_V1.3_at | AAAGATCTTTTGGTTTCTCTGTCAA | SEQ ID NO:1567 |
| WBC028F05_V1.3_at | AAACTGTCCTTTCCATTAGCATTCT | SEQ ID NO:1568 |
| WBC028F05_V1.3_at | AAGAATTTGTCCTAGGGCTGCTTTC | SEQ ID NO:1569 |
| WBC028F05_V1.3_at | CAGCCTTTACAGACCTTGTTTTCAG | SEQ ID NO:1570 |
| WBC028F05_V1.3_at | GTTTTTTCCCCTCATACATTCTAGA | SEQ ID NO:1571 |
| WBC028F05_V1.3_at | GTTCAGTTCGTTTCCATAGTAGCCA | SEQ ID NO:1572 |
| WBC028F05_V1.3_at | GTAGCTTTAATCACATCTCTTCCTT | SEQ ID NO:1573 |
| WBC028F05_V1.3_at | TCTTCCTTAGAAGTCTCAGCCTTTA | SEQ ID NO:1574 |
| WBC028F05_V1.3_at | TAGGACCCATTTATCTTTCTTACCA | SEQ ID NO:1575 |
| WBC028F05_V1.3_at | TTGCCTGAGAACATTCATCCTGCTT | SEQ ID NO:1576 |
| No homology | | |
| WBC030C04_V1.3_at | ATGCGCACATTTACTAGCACCTACT | SEQ ID NO:1577 |
| WBC030C04_V1.3_at | ATGGACTTCCCTGCATTGTATGAGA | SEQ ID NO:1578 |
| WBC030C04_V1.3_at | ATGTGCTGTGTGCTCTGTGTACCCT | SEQ ID NO:1579 |
| WBC030C04_V1.3_at | AGTTGTCTGGCCCAAAGCATCAGCA | SEQ ID NO:1580 |
| WBC030C04_V1.3_at | GAGTTCGATTCCCATCTGAAACGAC | SEQ ID NO:1581 |
| WBC030C04_V1.3_at | GAGACATTTTCCGTTGTCACAACTT | SEQ ID NO:1582 |
| WBC030C04_V1.3_at | GAGAGGTCACCGATGCTGCTAAACA | SEQ ID NO:1583 |
| WBC030C04_V1.3_at | GTGTGGCCTTAGTGACCAATCAGTC | SEQ ID NO:1584 |
| WBC030C04_V1.3_at | TGTGTACCCTCAGATCACGTGAACT | SEQ ID NO:1585 |
| WBC030C04_V1.3_at | TACTGAGGGCTTACCATGTGCTGTG | SEQ ID NO:1586 |
| WBC030C04_V1.3_at | TTCACCCCTCGGAACATCGATGATG | SEQ ID NO:1587 |
| Putative membrane | | |
| protein (GENX-3745 | | |
| gene) | | |
| WBC030D02_V1.3_at | AAGAAAGTTCCACCATAATGACCCT | SEQ ID NO:1588 |
| WBC030D02_V1.3_at | CTATGGTCTTTATTTCTTGTGGTGA | SEQ ID NO:1589 |
| WBC030D02_V1.3_at | CCTAATTCCCTTCCTGATGTGTATT | SEQ ID NO:1590 |
| WBC030D02_V1.3_at | GTTGTTTAACGTCTTCTGATTCAGT | SEQ ID NO:1591 |
| WBC030D02_V1.3_at | GTCAGTAGGATTTTTGGTACCACCA | SEQ ID NO:1592 |
| WBC030D02_V1.3_at | GTAAAATTCTCCAACTGCTATCTAT | SEQ ID NO:1593 |
| WBC030D02_V1.3_at | GGTGAAACGATGTGCCTTTCCTTGC | SEQ ID NO:1594 |
| WBC030D02_V1.3_at | TGGCTGGTCATTAACTTCCAACTAT | SEQ ID NO:1595 |
| WBC030D02_V1.3_at | TCCTTCACACATCAGGCTCATTAAG | SEQ ID NO:1596 |
| WBC030D02_V1.3_at | TAATGACCCTCCCAAGCTAGGAAAA | SEQ ID NO:1597 |
| WBC030D02_V1.3_at | TTTGGATTTTGCTTCTTCCTTCACA | SEQ ID NO:1598 |
| DDHD domain containing | | |
| 1 | | |
| WBC032B05_V1.3_at | ATGTCTCTGCATGTTATCACGGAAT | SEQ ID NO:1599 |
| WBC032B05_V1.3_at | GCAACATTCAAAACCGCCTTTTCAA | SEQ ID NO:1E0O |
| WBC032B05_V1.3_at | AAATATGTCTGCTTCCCTTTTTTCA | SEQ ID NO:1601 |
| WBC032B05_V1.3_at | GCTTTCAGTTCATTATTTCATCCAT | SEQ ID NO:1602 |
| WBC032B05_V1.3_at | GCAGCTTTATTTCAGCAAGTACTAA | SEQ ID NO:1603 |
| WBC032B05_V1.3_at | GAAGAGTCCTTTTCACCTAAGAGTG | SEQ ID NO:1604 |
| WBC032B05_V1.3_at | GATATTCTGCATTACTGGACGGATA | SEQ ID NO:1605 |
| WBC032B05_V1.3_at | GGTGGTATGACACTCAAATGCCTAC | SEQ ID NO:1606 |
| WBC032B05_V1.3_at | GGATTCATTCTTAACCACTACGGTG | SEQ ID NO:1607 |
| WBC032B05_V1.3_at | GGACGGATATTTTGCTTTCAGTTCA | SEQ ID NO:1608 |
| WBC032B05_V1.3_at | TACAGTACTCTTGTTTCCATGTCTC | SEQ ID NO:1609 |
| WBC032B11_V1.3_at | ATTTGGGTCTATGCTATGTTATTAA | SEQ ID NO:1610 |
| WBC032B11_V1.3_at | ATCGGTACGTTGGAAACTGTGCAAA | SEQ ID NO:1611 |
| WBC032B11_V1.3_at | ACTTTTGTGCAATATCTGTCTGATT | SEQ ID NO:1612 |
| WBC032B11_V1.3_at | AACTATTCTTGATTCTGTCTGTGCC | SEQ ID NO:1613 |
| WBC032B11_V1.3_at | AAGATGTTTCTATTTTGGGCAGCAT | SEQ ID NO:1614 |
| WBC032B11_V1.3_at | CTTTGTGTTTTATTTTCTGTCCTAT | SEQ ID NO:1615 |
| WBC032B11_V1.3_at | GAAGATATTCCATTTCTTTGTGTTT | SEQ ID NO:1616 |
| WBC032B11_V1.3_at | GATTCTGTCTGTGCCTTTATATTTT | SEQ ID NO:1617 |
| WBC032B11_V1.3_at | GTATGGAATTACTGACTTTTGTGCA | SEQ ID NO:1618 |
| WBC032B11_V1.3_at | GGCACTTAGGAACATATCGGTACGT | SEQ ID NO:1619 |
| WBC032B11_V1.3_at | TTAGAGTCTATTTCCCATAATTTGG | SEQ ID NO:1620 |
| Glycerol kinase (GK) | | |
| WBC032G05_V1.3_at | ATGAACCGCGACTGTGGGATTCCAC | SEQ ID NO:1621 |
| WBC032G05_V1.3_at | AAACAACGGCTCTGGGAGCTGCCAT | SEQ ID NO:1622 |
| WBC032G05_V1.3_at | GCTGACATTCTGTACATCCCAGTAG | SEQ ID NO:1623 |
| WBC032G05_V1.3_at | GAATCCAGTGGTTGTCTCTAAATGT | SEQ ID NO:1624 |
| WBC032G05_V1.3_at | GAACCCGAGGATTTGTCAGCTGTCA | SEQ ID NO:1625 |
| WBC032G05_V1.3_at | GTAGTGAAGCCCTCGATGCCTGAAA | SEQ ID NO:1626 |
| WBC032G05_V1.3_at | GATTCCACTCAGTCATTTGCAGGTA | SEQ ID NO:1627 |
| WBC032G05_V1.3_at | GTTGGGTTACAACTCAGTCTTCGGA | SEQ ID NO:1628 |
| WBC032G05_V1.3_at | GTGGGCTCACACAGTTCACCAATAA | SEQ ID NO:1629 |
| WBC032G05_V1.3_at | TGCCATATTGCTTTTGCCGCATTAG | SEQ ID NO:1630 |
| WBC032G05_V1.3_at | TAGAAGCTGTCTGTTTCCAAACCCG | SEQ ID NO:1631 |
| Selenoprotein P | | |
| WBC037F12_V1.3_at | ATCTTGATTTTTACTACCACATATG | SEQ ID NO:1632 |
| WBC037F12_V1.3_at | ATCTTGTTTTCTTTATCTAGCATCG | SEQ ID NO:1633 |
| WBC037F12_V1.3_at | AATATCCACTTATACGTACATCTAA | SEQ ID NO:1634 |
| WBC037F12_V1.3_at | CCTGAACTCCTTTATGGTTAATACT | SEQ ID NO:1635 |
| WBC037F12_V1.3_at | GCTATCTTTGTCTTTTTCATCTTAT | SEQ ID NO:1636 |
| WBC037F12_V1.3_at | GAATGCAATACACAGTTGGCCAAGT | SEQ ID NO:1637 |
| WBC037F12_V1.3_at | GAATATTTTGCTATGACTACAGTTT | SEQ ID NO:1638 |
| WBC037F12_V1.3_at | GAATGTTGTCTATCTCTTGATTGCT | SEQ ID NO:1639 |
| WBC037F12_V1.3_at | GAAATGTGAGAGTGCCCCTTGAAAG | SEQ ID NO:1640 |
| WBC037F12_V1.3_at | TCTAGCATCGTATCGCACTTTGAAA | SEQ ID NO:1641 |
| WBC037F12_V1.3_at | TAAGTCCTATAAACCTGAACTCCTT | SEQ ID NO:1642 |
| No Homology | | |
| WBC038G11_V1.3_at | ATCTGTGGCGGATGTTTCTTCTCTG | SEQ ID NO:1643 |
| WBC038G11_V1.3_at | AGGAGTTCTCCTGAGCTCAGCCGAG | SEQ ID NO:1644 |
| WBC038G11_V1.3_at | AGCAGTTCTTCCTGAACGGCTTTGA | SEQ ID NO:1645 |
| WBC038G11_V1.3_at | AGACTGACAGCTGACTCCCAGGAGT | SEQ ID NO:1646 |
| WBC038G11_V1.3_at | ACGTGCATGTGTCTTCCAGGAGCAT | SEQ ID NO:1647 |
| WBC038G11_V1.3_at | AAACAAGCGACATCAGCACCTGGGA | SEQ ID NO:1648 |
| WBC038G11_V1.3_at | AAGGAAGGGCTCTGCCTGAGCAGTT | SEQ ID NO:1649 |
| WBC038G11_V1.3_at | GAACTTGGTCGCATTTGGTCTGAAA | SEQ ID NO:1650 |
| WBC038G11_V1.3_at | GAAGGAGTTCCCTGATCGGCTACAG | SEQ ID NO:1651 |
| WBC038G11_V1.3_at | GTGAACTGCCTGTTGAACTTGGTCG | SEQ ID NO:1652 |
| WBC038G11_V1.3_at | GGAGCATTGCACGTTGCCTGTAGAA | SEQ ID NO:1653 |
| Leu-8 pan leukocyte | | |
| antigen | | |
| WBC039F12_V1.3_at | ACATGCACCTTCAACTGCTCAGAAG | SEQ ID NO:1654 |
| WBC039F12_V1.3_at | AAACATTTGGCTGATTTTTGCTTTT | SEQ ID NO:1655 |
| WBC039F12_V1.3_at | GCAGGATACCAAGCTCTATGTTTTA | SEQ ID NO:1656 |
| WBC039F12_V1.3_at | GATCATCAGGAATCTGGTCCAGCAC | SEQ ID NO:1657 |
| WBC039F12_V1.3_at | GTTGGCATTTATCATTTGGCTGGCA | SEQ ID NO:1658 |
| WBC039F12_V1.3_at | GTTTTATAGACATCAGTCCCTGGAG | SEQ ID NO:1659 |
| WBC039F12_V1.3_at | GTGAAGCAGCCCAGTACATACTTTC | SEQ ID NO:1660 |
| WBC039F12_V1.3_at | GTCATGGTTACTGCATTATCTGGGT | SEQ ID NO:1661 |
| WBC039F12_V1.3_at | GGTCCAGCACTAGTCCAATGTGTCA | SEQ ID NO:1662 |
| WBC039F12_V1.3_at | TGGACAGGAGTTTCACGGCGATCAA | SEQ ID NO:1663 |
| WBC039F12_V1.3_at | TCATCCCTGTGGCAGTCATGGTTAC | SEQ ID NO:1664 |
| WBC040E12_V1.3_at | AAATCATCATAACTCAACTCCTACG | SEQ ID NO:1665 |
| WBC040E12_V1.3_at | AACTTTGTGTCAGCGATACCCTTTA | SEQ ID NO:1666 |
| WBC040E12_V1.3_at | AACTATTATCTCATCCTCTTTTTCG | SEQ ID NO:1667 |
| WBC040E12_V1.3_at | AATACAGGGTTGGTGCTCTCATCTA | SEQ ID NO:1668 |
| WBC040E12_V1.3_at | GAAGTACTTCGTGGGCTATCTGGGA | SEQ ID NO:1669 |
| WBC040E12_V1.3_at | GAAACGCATCATACTGTTCCTGTTC | SEQ ID NO:1670 |
| WBC040E12_V1.3_at | GAGTTAACCTTGCTTTTCCTGGAAG | SEQ ID NO:1671 |
| WBC040E12_V1.3_at | GATCCATTCTGTGTGTTTCTTGACT | SEQ ID NO:1672 |
| WBC040E12_V1.3_at | TGGGCTTCGCGTCTTGAGTTAACCT | SEQ ID NO:1673 |
| WBC040E12_V1.3_at | TACGGTCCTCTTTAGATTGCTGTAA | SEQ ID NO:1674 |
| WBC040E12_V1.3_at | TTGACTTACCCTGCTTTCTGAAGAT | SEQ ID NO:1675 |
| WBC041B04_V1.3_at | ATAAAGCCCTGGAGGGCCCTGAGGC | SEQ ID NO:1676 |
| WBC041B04_V1.3_at | AGAATGGGACCATTTCTCTGTGAAT | SEQ ID NO:1677 |
| WBC041B04_V1.3_at | ACCACTTTCCTATTTCACCTGATTT | SEQ ID NO:1678 |
| WBC041B04_V1.3_at | AAGGGTACATTTCTCCTATGGCCGA | SEQ ID NO:1679 |
| WBC041B04_V1.3_at | CTATGGCCGATTTCAGGAATTTCAA | SEQ ID NO:1680 |
| WBC041B04_V1.3_at | CCTGAGGCTCACTGCTGACTGAGAA | SEQ ID NO:1681 |
| WBC041B04_V1.3_at | GACTGAGAACTCTGTGGAACATGAT | SEQ ID NO:1682 |
| WBC041B04_V1.3_at | GAGAATCCTTCAGTTCATTCACAAA | SEQ ID NO:1683 |
| WBC041B04_V1.3_at | GTGTTAACCATGAAAGTACTCGAAG | SEQ ID NO:1684 |
| WBC041B04_V1.3_at | GGAACATGATCCTAGGCACTGAAGT | SEQ ID NO:1685 |
| WBC041B04_V1.3_at | GGCACTGAAGTATCGACCACTTTCC | SEQ ID NO:1686 |
| ARP3 actin-related | | |
| protein 3 homolog | | |
| (yeast) | | |
| WBC041B05_V1.3_at | ATTTATCGGTATGTAGATAGCTCTA | SEQ ID NO:1687 |
| WBC041B05_V1.3_at | ACACTTCTAAGTGGGCAATGCAAGA | SEQ ID NO:1688 |
| WBC041B05_V1.3_at | AATGCTTGAATTGTACACTTCTAAG | SEQ ID NO:1689 |
| WBC041B05_V1.3_at | AATATTTGAATCTTATGTGTAACCA | SEQ ID NO:1690 |
| WBC041B05_V1.3_at | CCAAGATTTGATGGGATTTATCGGT | SEQ ID NO:1691 |
| WBC041B05_V1.3_at | GCAAGAGCTTGTTTATATTTCATAC | SEQ ID NO:1692 |
| WBC041B05_V1.3_at | GTAGATAGCTCTATAATGCTTGAAT | SEQ ID NO:1693 |
| WBC041B05_V1.3_at | TGGGTTTTAGTTCTTTCTGTGCCCT | SEQ ID NO:1694 |
| WBC041B05_V1.3_at | TCATACTTTTTATACTTTGAGGAAA | SEQ ID NO:1695 |
| WBC041B05_V1.3_at | TTTAGTTCTTTCTGTGCCCTGATAT | SEQ ID NO:1696 |
| WBC041B05_V1.3_at | TTCTGTGCCCTGATATTTTGTATAT | SEQ ID NO:1697 |
| WBC041B05_V1.3_s_at | ATGCCTGCTTAGTGCTTTCTGATTA | SEQ ID NO:1698 |
| WBC041B05_V1.3_s_at | AGCCTCATGAGACTTGGCATACACA | SEQ ID NO:1699 |
| WBC041B05_V1.3_s_at | ACTCGCATTCTGTTTCTTGCTTTAA | SEQ ID NO:1700 |
| WBC041B05_V1.3_s_at | TCTTTGCAAGTGCTTTTGGAACTAA | SEQ ID NO:1701 |
| WBC041B05_V1.3_s_at | CCCCACAATGATTTTCTTTGCAAGT | SEQ ID NO:1702 |
| WBC041B05_V1.3_s_at | GCTTTCTGATTACTCGCATTCTGTT | SEQ ID NO:1703 |
| WBC041B05_V1.3_s_at | GCAGTTCTGTAGTGTCATTTCTTAT | SEQ ID NO:1704 |
| WBC041B05_V1.3_s_at | GTTTAAAGCCTAACACCATTCTAAT | SEQ ID NO:1705 |
| WBC041B05_V1.3_s_at | GGGATTCCAGTTATTACGAGTTGCT | SEQ ID NO:1706 |
| WBC041B05_V1.3_s_at | TCTTGGATTAACTGATGCCTGCTTA | SEQ ID NO:1707 |
| WBC041B05_V1.3_s_at | TACACACACACTCATGGGATTCCAG | SEQ ID NO:1708 |
| WBC043E03_V1.3_at | ATGACCCGAGAGGTGCAGACCAATG | SEQ ID NO:1709 |
| WBC043E03_V1.3_at | ATCCACTCCATGATGTCTTTGTTAG | SEQ ID NO:1710 |
| WBC043E03_V1.3_at | ATGGGATGGATCTTACTCGTGACAA | SEQ ID NO:1711 |
| WBC043E03_V1.3_at | ATGGTTATTTGCTTCGTCTGTTCTG | SEQ ID NO:1712 |
| WBC043E03_V1.3_at | AACTGCCTAACTAACTTCCATGGGA | SEQ ID NO:1713 |
| WBC043E03_V1.3_at | AAGGCTTGCCAGTCTATTTATCCAC | SEQ ID NO:1714 |
| WBC043E03_V1.3_at | GATTCGGAAGACCTCTTATGCTCAG | SEQ ID NO:1715 |
| WBC043E03_V1.3_at | GTCTGTTCTGTGTTGGTTTTACTAA | SEQ ID NO:1716 |
| WBC043E03_V1.3_at | TGACGGATACGAGCCACCAGTGCAA | SEQ ID NO:1717 |
| WBC043E03_V1.3_at | TTATGCTCAGCACCAACAGGTCCGT | SEQ ID NO:1718 |
| WBC043E03_V1.3_at | TGACGTCAAGACTACCGATGGTTAT | SEQ ID NO:1719 |
| Homo sapiens high | | |
| mobility group | | |
| nucleosomal binding | | |
| domain 4, mRNA | | |
| WBC043G11_V1.3_at | CAGTTTTGCTTGTCATACGTCTTTA | SEQ ID NO:1720 |
| WBC043G11_V1.3_at | CAGTGTTGAATCTTCCAATCCATGA | SEQ ID NO:1721 |
| WBC043G11_V1.3_at | GACCTGTAACACTGTCTCTTTCATA | SEQ ID NO:1722 |
| WBC043G11_V1.3_at | GATGGTTTCTGTTCTGACTCACTGG | SEQ ID NO:1723 |
| WBC043G11_V1.3_at | GTCAATTTGTCTAACCTGTGGCAGT | SEQ ID NO:1724 |
| WBC043G11_V1.3_at | GTGGCAGTACTATACAATCCTGAGT | SEQ ID NO:1725 |
| WBC043G11_V1.3_at | GGTTGTTGCAGCACCATTTTCTGAA | SEQ ID NO:1726 |
| WBC043G11_V1.3_at | TGAAAAGTTCATCCTTTCCTCACTG | SEQ ID NO:1727 |
| WBC043G11_V1.3_at | TTTGTGTGGGTCTCTTGATGGTTTC | SEQ ID NO:1128 |
| WBC043G11_V1.3_at | TTAGCCATTTGCTTTTCCATACAAT | SEQ ID NO:1729 |
| WBC043G11_V1.3_at | TTCTTCCTTGAGAGTATCTTGGCTA | SEQ ID NO:1730 |
| WBC133.V1.3_at | ATGTTATCTACAGACTTTGGGTGAT | SEQ ID NO:1731 |
| WBC133.V1.3_at | AGCCCATAGAATGCACAACACCAAG | SEQ ID NO:1732 |
| WBC133.V1.3_at | CAGAGGATTTTTAGGGCAGTGAAAC | SEQ ID NO:1733 |
| WBC133.V1.3_at | CAGCTATTATGATCCTGAATGTATA | SEQ ID NO:1734 |
| WBC133.V1.3_at | GCAGGTAACAGAGCACAGAGGATTT | SEQ ID NO:1735 |
| WBC133.V1.3_at | GAGAAAACCCTAATGTTATCTACAG | SEQ ID NO:1736 |
| WBC133.V1.3_at | GTAAACACAGGAAATCTGAACCAGA | SEQ ID NO:1731 |
| WBC133.V1.3_at | GTCTGATACTTTAACAGTGGACACA | SEQ ID NO:1738 |
| WBC133.V1.3_at | GTGGACACATGTCATTATACGTTTG | SEQ ID NO:1739 |
| WBC133.V1.3_at | GGCAGTGAAACAATTCTGTCTGATA | SEQ ID NO:1740 |
| WBC133.V1.3_at | TATACGTTTGTTTAAGCCCATAGAA | SEQ ID NO:1741 |
| Mst3 and SOK1-related | | |
| kinase (MASK) | | |
| WBC166.gRSP.V1.3_at | TTTAGTCAAAGTGCCCATTACCTCC | SEQ ID NO:1742 |
| WBC166.gRSP.V1.3_at | AAAATTTTCACCTGCTGTCTAACTG | SEQ ID NO:1743 |
| WBC166.gRSP.V1.3_at | CATTACCTCCTCTGTTTTTGTAATA | SEQ ID NO:1744 |
| WBC166.gRSP.V1.3_at | CTGCTGTCTAACTGAAATTCCATTA | SEQ ID NO:1745 |
| WBC166.gRSP.V1.3_at | GAAATTCTTTTCATTGGTGCCTGTA | SEQ ID NO:1746 |
| WBC166.gRSP.V1.3_at | GTTTGGATCTGCACAATTGGGTTTT | SEQ ID NO:1747 |
| WBC166.gRSP.V1.3_at | GTTAGTAGTCCTGTAAAGTGTTTCT | SEQ ID NO:1748 |
| WBC166.gRSP.V1.3_at | GGTGCCTGTACTGTAACAATTACTT | SEQ ID NO:1749 |
| WBC166.gRSP.V1.3_at | GGGTTTTTGCACAGAAGTCATTTTT | SEQ ID NO:1750 |
| WBC166.gRSP.V1.3_at | TCTAGGTGAAGCATACTCCAGTGTT | SEQ ID NO:1751 |
| WBC166.gRSP.V1.3_at | TTGACGACACAACTGTATCATGGAT | SEQ ID NO:1752 |
| CGG triplet repeat | | |
| binding protein 1 | | |
| (CGGBP1), | | |
| WBC434.gRSP.V1.3_at | ATGGAGGCTCCATACCTAAGTCAGA | SEQ ID NO:1753 |
| WBC434.gRSP.V1.3_at | AACTGCATCGCTTCAGTGCAACAGT | SEQ ID NO:1754 |
| WBC434.gRSP.V1.3_at | AAGACTGCTTTGTATGTGACTCCCC | SEQ ID NO:1755 |
| WBC434.gRSP.V1.3_at | AAGGAGGCTACCACCATTGTGATCA | SEQ ID NO:1756 |
| WBC434.gRSP.V1.3_at | AAGTCTGCCATTAGTGACCACCTCA | SEQ ID NO:1757 |
| WBC434.gRSP.V1.3_at | CTGAATCATGTTCGCAAGTCTGCCA | SEQ ID NO:1758 |
| WBC434.gRSP.V1.3_at | CAGCTCCTCAACTCACAAGATTGTT | SEQ ID NO:1759 |
| WBC434.gRSP.V1.3_at | GCACTTCTTGCAATGTGGTTCTGAA | SEQ ID NO:1760 |
| WBC434.gRSP.V1.3_at | GGAGGAAAACTCTTCTGCACTTCTT | SEQ ID NO:1761 |
| WBC434.gRSP.V1.3_at | GGAGGCCAACATCCCACTTGAGAAG | SEQ ID NO:1762 |
| WBC434.gRSP.V1.3_at | TTCCTGTCTCGCCACGTGAAGAATG | SEQ ID NO:1763 |
| Homo sapiens mRNA; | | |
| cDNA DKFZp667N084 | | |
| WBC493.V1.3_at | AGTGTCACAGTACATTTTCAAGTTT | SEQ ID NO:1764 |
| WBC493.V1.3_at | ACAGTGCCTCTGTATGCTTTTTGTA | SEQ ID NO:1765 |
| WBC493.V1.3_at | AACGCTTCTTTATTTTTGATACACA | SEQ ID NO:1766 |
| WBC493.V1.3_at | CAGACTGCAGTCGTACTTGATTTTT | SEQ ID NO:1767 |
| WBC493.V1.3_at | CCAGTTCATCTTTAGCTTTCGTTGT | SEQ ID NO:1768 |
| WBC493.V1.3_at | GAACTGCACAGTCCTAATAATCAAA | SEQ ID NO:1769 |
| WBC493.V1.3_at | GATACCTCTTAAACTTATGTCTTTT | SEQ ID NO:1770 |
| WBC493.V1.3_at | GATATATCCCTTTAGCATTACCTTA | SEQ ID NO:1771 |
| WBC493.V1.3_at | GTTTAGACTTGAATCCCAGTTCATC | SEQ ID NO:1772 |
| WBC493.V1.3_at | TGTTTCCTATTTTTTGATACCTCTT | SEQ ID NO:1773 |
| WBC493.V1.3_at | TCGTTGTGCTTTTTTAACGCTTCTT | SEQ ID NO:1774 |
| Zinc Finger Protein | | |
| 198 | | |
| WBC590.V1.3_at | ATGTTTTCGCTTTTATTGTTATGTG | SEQ ID NO:1775 |
| WBC590.V1.3_at | AGAGTGTATGCCTATTTTTATGTTG | SEQ ID NO:1776 |
| WBC590.V1.3_at | ACTTGTGATTTCTTTCTTTTGAGGA | SEQ ID NO:1777 |
| WBC590.V1.3_at | AAGCAGCATCTTTGTTACGTTAAAT | SEQ ID NO:1778 |
| WBC590.V1.3_at | AAGTTTGGTTGATTTTCTGTTCTGA | SEQ ID NO:1779 |
| WBC590.V1.3_at | GAACAAGCGTTATCATCATTATTAT | SEQ ID NO:1780 |
| WBC590.V1.3_at | GATGTGAAACTGCACCTTTTTGCTA | SEQ ID NO:1781 |
| WBC590.V1.3_at | GGCTTAAATTTATCCATACCAGTTT | SEQ ID NO:1782 |
| WBC590.V1.3_at | GGTATTTGAGGACTGACATTTGACA | SEQ ID NO:1783 |
| WBC590.V1.3_at | GGCACTTGTTAATTTTTTCAGTCTG | SEQ ID NO:1784 |
| WBC590.V1.3_at | TTCAGTCTGTCAATTCACACCTTTT | SEQ ID NO:1785 |
| No Homology | | |
| BM780906.V1.3_at | AGCTGAAACACATCTCTTGGGTCCT | SEQ ID NO:1786 |
| BM780906.V1.3_at | GCTTCCCATCATAGTTTTGCCGTTA | SEQ ID NO:1787 |
| BM780906.V1.3_at | GATTCCCAGAATGCCATCGATGACC | SEQ ID NO:1788 |
| BM780906.V1.3_at | GTTCCGTTTTCAAGGACCAGTCAGC | SEQ ID NO:1789 |
| BM780906.V1.3_at | GTAACAGTGACTCCTGATTCCCAGA | SEQ ID NO:1790 |
| BM780906.V1.3_at | GTGTGAGCAGCTCCTCCTGTATAGT | SEQ ID NO:1791 |
| BM780906.V1.3_at | TGGAGCTTTTGCCTGTAGCTTGAGA | SEQ ID NO:1792 |
| BM780906.V1.3_at | TGTATAGTCCTCTTCTTCACTGAAT | SEQ ID NO:1793 |
| BM780906.V1.3_at | TCAGTACGTCAGTGGTGGAGCTTTT | SEQ ID NO:1794 |
| BM780906.V1.3_at | TTCACTGAATGCTGGAACCTCCAAC | SEQ ID NO:1795 |
| BM780906.V1.3_at | TTTACCCGCAGTATCAAGCACAAGA | SEQ ID NO:1796 |
| B1961054.V1.3_at | TCAGTAGTAACTCTGCCTTGGCACT | SEQ ID NO:1797 |
| B1961054.V1.3_at | ATATGTCAAGCCCTAATTGTCCCCG | SEQ ID NO:1798 |
| B1961054.V1.3_at | ATGGTTCATCATCCTGAGCTGTTCA | SEQ ID NO:1799 |
| B1961054.V1.3_at | AATTAGCTGCTACTACTCCTGCAGG | SEQ ID NO:1800 |
| B1961054.V1.3_at | CAACGTGTTGAGATCATTGCCACAA | SEQ ID NO:1801 |
| B1961054.V1.3_at | GCCATCATTTCCCTGCATACAGTAT | SEQ ID NO:1802 |
| B1961054.V1.3_at | GAATCCAGAGTCCAAGACCGTCAAG | SEQ ID NO:1803 |
| B1961054.V1.3_at | GGTACTACTGATACGGATGGCCCAA | SEQ ID NO:1804 |
| B1961054.V1.3_at | GTTCTCCTAAGATGACCAACCAGTC | SEQ ID NO:1805 |
| B1961054.V1.3_at | GGTCTAAAAGATCTCCTCGAACACT | SEQ ID NO:1806 |
| B1961054.V1.3_at | TAATTGTCCCCGGATTGCAGTTCTC | SEQ ID NO:1807 |

TABLE 3
AMINO ACID SUB-CLASSIFICATION

| Sub-classes | Amino acids |
|---|---|
| Acidic | Aspartic acid, Glutamic acid |
| Basic | Noncyclic: Arginine, Lysine; Cyclic: Histidine |
| Charged | Aspartic acid, Glutamic acid, Arginine, Lysine, Histidine |
| Small | Glycine, Serine, Alanine, Threonine, Proline |
| Polar/neutral | Asparagine, Histidine, Glutamine, Cysteine, Serine, |
| | Threonine |
| Polar/large | Asparagine, Glutamine |
| Hydrophobic | Tyrosine, Valine, Isoleucine, Leucine, Methionine, |
| | Phenylalanine, Tryptophan |
| Aromatic | Tryptophan, Tyrosine, Phenylalanine |
| Residues that | Glycine and Proline |
| influence chain | |
| orientation | |

TABLE 4
EXEMPLARY AND PREFERRED AMINO ACID SUBSTITUTIONS

| Original | | Preferred |
|---|---|---|
| Residue | Exemplary Substitutions | Substitutions |
| Ala | Val, Leu, Ile | Val |
| Arg | Lys, Gln, Asn | Lys |
| Asn | Gln, His, Lys, Arg | Gln |
| Asp | Glu | Glu |
| Cys | Ser | Ser |
| Gln | Asn, His, Lys, | Asn |
| Glu | Asp, Lys | Asp |
| Gly | Pro | Pro |
| His | Asn, Gln, Lys, Arg | Arg |
| Ile | Leu, Val, Met, Ala, Phe, Norleu | Leu |
| Leu | Norleu, Ile, Val, Met, Ala, Phe | Ile |
| Lys | Arg, Gln, Asn | Arg |
| Met | Leu, Ile, Phe | Leu |
| Phe | Leu, Val, Ile, Ala | Leu |
| Pro | Gly | Gly |
| Ser | Thr | Thr |
| Thr | Ser | Ser |
| Trp | Tyr | Tyr |
| Tyr | Trp, Phe, Thr, Ser | Phe |
| Val | Ile, Leu, Met, Phe, Ala, Norleu | Leu |

TABLE 5
PRIORITY RANKING OF GENES BASED ON P VALUES

| Gene Name | Day | P. Value | Day | P. Value | Day | P. Value | Day | P. Value |
|---|---|---|---|---|---|---|---|---|
| BM734889 | 0 | 5.62E−020 | 2 | 1.14E−09 | 4 | 7.81E−07 | 7 | 6.7E−09 |
| WBC005D02 | 0 | 8.19E−020 | 2 | 1.32E−12 | 4 | 1.59E−06 | 7 | 5.94E−05 |
| BM734862 | 0 | 1.13E−13 | 2 | 4.21E−06 | 4 | 0.047483 | 7 | 8.48E−06 |
| B1961941 | 0 | 1.45E−13 | 2 | 1.75E−12 | 4 | 7.44E−05 | 7 | 4.09E−08 |
| WBC001C12 | 9 | 3.77E−12 | 11 | 1.84E−05 | 14 | 0.000645 | | |
| BM735487 | 0 | 4E−12 | 2 | 1.07E−10 | 4 | 3.07E−05 | 7 | 1.27E−14 |
| BM734722 | 0 | 4.27E−11 | 2 | 5.64E−10 | 4 | 3.22E−07 | 7 | 4.34E−11 |
| WBC008F06 | 9 | 8.8E−10 | 11 | 6.43E−07 | 14 | 0.037099 | | |
| B1961620 | 0 | 3.23E−09 | 2 | 1.46E−05 | 4 | 0.002125 | 7 | 6.48E−09 |
| BM735585 | 0 | 5.47E−09 | 2 | 6.71E−10 | 4 | 0.000125 | 7 | 2.85E−10 |
| WBC022F08 | 0 | 5.61E−09 | 2 | 5.81E−12 | 7 | 0.000304 | | |
| BM735573 | 0 | 7.07E−09 | 2 | 2.72E−07 | 4 | 0.001579 | | |
| B1961682 | 0 | 7.71E−09 | 2 | 0.024969 | 7 | 0.000375 | 14 | 0.005519 |
| WBC021B08 | 2 | 9.14E−09 | 7 | 1.24E−07 | 9 | 2.61E−09 | 11 | 1.81E−06 |
| WBC032G05 | 0 | 1.38E−08 | 2 | 3.35E−05 | 7 | 0.000114 | 11 | 0.008059 |
| BM781178 | 0 | 1.38E−08 | 2 | 1.35E−05 | 4 | 0.012404 | | |
| gi576646 | 0 | 1.87E−08 | 2 | 9.73E−06 | 4 | 0.000899 | 7 | 1.12E−06 |
| GI1592834 | 0 | 2.53E−08 | 2 | 7.16E−08 | 7 | 0.000149 | | |
| B1961443 | 0 | 3.82E−08 | 7 | 0.000109 | 9 | 0.021125 | 14 | 0.021335 |
| WBC030C04 | 0 | 4.93E−08 | 2 | 3.01E−10 | 4 | 1.22E−09 | 7 | 7.54E−12 |
| BM781334 | 0 | 6.32E−08 | 7 | 0.000608 | 9 | 0.027236 | 14 | 0.033821 |
| B1961885 | 0 | 6.83E−08 | 2 | 4.67E−06 | 7 | 0.000802 | | |
| BM781174 | 0 | 8.96E−08 | 2 | 0.000313 | 4 | 0.003936 | 7 | 0.033205 |
| WBC434 | 2 | 1.08E−07 | 4 | 0.005926 | 7 | 2.94E−11 | 9 | 3.71E−08 |
| B1961671 | 0 | 1.14E−07 | 2 | 1.51E−05 | 4 | 0.000753 | 7 | 7.49E−08 |
| WBC024F08 | 2 | 1.78E−07 | 7 | 3.09E−08 | 9 | 0.000111 | 11 | 0.00276 |
| WBC007G12 | 0 | 2.09E−07 | 2 | 0.022205 | 7 | 0.003859 | | |
| WBC001F11 | 9 | 2.15E−07 | 11 | 6.5E−05 | 14 | 0.001586 | | |
| WBC003D11 | 2 | 2.81E−07 | 7 | 0.000171 | 9 | 0.009387 | | |
| WBC022B05 | 2 | 5.27E−07 | 7 | 1.65E−07 | 9 | 0.001287 | | |
| BM780906 | 0 | 6.11E−07 | 2 | 2.93E−06 | 7 | 0.000897 | | |
| WBC012F07 | 0 | 8.91E−07 | 2 | 3.32E−07 | 7 | 1.59E−06 | | |
| BM734865 | 0 | 9.12E−07 | 2 | 1.05E−05 | 7 | 7.76E−06 | 9 | 2.22E−05 |
| WBC014G08 | 9 | 1.04E−06 | 11 | 0.006248 | 14 | 0.001349 | | |
| WBC028C01 | 0 | 1.15E−06 | 2 | 0.002318 | 7 | 0.008866 | | |
| WBC013E10 | 2 | 1.24E−06 | 4 | 0.03163 | 7 | 0.000149 | 9 | 0.014568 |
| WBC009B10 | 2 | 1.55E−06 | 7 | 0.008422 | 9 | 0.000196 | | |
| BM734654 | 0 | 1.57E−06 | 2 | 4.23E−05 | 4 | 0.002656 | 7 | 1.42E−05 |
| BM735536 | 0 | 1.97E−06 | 2 | 2.54E−12 | 4 | 6.46E−09 | 7 | 7.41E−14 |
| WBC003F02 | 7 | 2.42E−06 | 9 | 5.83E−06 | 11 | 2.53E−06 | | |
| WBC012E07 | 0 | 3.05E−06 | 4 | 0.018001 | 7 | 4.76E−07 | 9 | 4.2E−06 |
| WBC014H06 | 2 | 3.33E−06 | 7 | 1.81E−08 | 9 | 5.88E−09 | 11 | 0.002383 |
| BM735576 | 0 | 3.53E−06 | 2 | 0.021658 | 7 | 2.73E−05 | 9 | 0.00685 |
| BM735352 | 2 | 4.38E−06 | 7 | 4.37E−06 | 9 | 0.005436 | 11 | 0.039799 |
| WBC007A09 | 0 | 6.08E−06 | 2 | 1.2E−06 | 7 | 9.74E−06 | 9 | 0.000112 |
| BM735457 | 2 | 6.8E−06 | 7 | 6.34E−05 | 9 | 1.91E−08 | | |
| WBC005F10 | 0 | 8.6E−06 | 2 | 2.42E−09 | 7 | 1.08E−05 | | |
| WBC020B04 | 0 | 8.98E−06 | 2 | 0.00137 | 7 | 0.022142 | | |
| WBC028E07 | 2 | 1.14E−05 | 7 | 0.000466 | 9 | 0.001507 | 11 | 9.31E−06 |
| BM735534 | 0 | 1.21E−05 | 2 | 4.54E−08 | 4 | 0.03855 | 7 | 3.37E−10 |
| WBC038G11 | 0 | 1.45E−05 | 2 | 5.1E−05 | 7 | 0.000481 | | |
| B1961711 | 0 | 1.62E−05 | 2 | 0.044085 | 7 | 1.69E−05 | | |
| B1961637 | 2 | 1.66E−05 | 7 | 6.29E−08 | 9 | 0.00037 | 11 | 0.007214 |
| WBC024C12 | 0 | 1.85E−05 | 2 | 0.008355 | 7 | 9.02E−06 | | |
| BM735450 | 0 | 1.92E−05 | 2 | 0.009622 | 4 | 0.003305 | 7 | 3.46E−05 |
| WBC006H06 | 7 | 1.97E−05 | 9 | 1.55E−05 | 14 | 0.005638 | | |
| WBC013H03 | 0 | 2.2E−05 | 2 | 3.3E−05 | 7 | 0.000509 | | |
| WBC030D02 | 7 | 2.28E−05 | 9 | 3.74E−08 | 11 | 4.8E−05 | 14 | 0.000181 |
| WBC006E03 | 9 | 2.92E−05 | 11 | 0.004223 | 14 | 6.36E−05 | | |
| WBC022B06 | 2 | 3.06E−05 | 7 | 6.19E−06 | 11 | 0.026743 | | |
| WBC028F05 | 0 | 3.15E−05 | 2 | 7.49E−07 | 4 | 0.003321 | 7 | 1.68E−09 |
| WBC009E12 | 9 | 3.25E−05 | 11 | 0.004629 | 14 | 0.0005 | | |
| WBC003H01 | 0 | 3.31E−05 | 7 | 0.000992 | 14 | 0.014301 | | |
| WBC026E02 | 0 | 3.43E−05 | 2 | 1.29E−07 | 7 | 0.021843 | | |
| WBC018D05 | 7 | 3.47E−05 | 9 | 0.027649 | 14 | 0.008898 | | |
| BM735166 | 0 | 3.88E−05 | 4 | 0.00401 | 7 | 0.000304 | 14 | 0.000601 |
| WBC028D09 | 0 | 4.84E−05 | 4 | 0.001241 | 7 | 6.41E−08 | 9 | 0.000202 |
| BM734531 | 0 | 4.96E−05 | 2 | 5.36E−08 | 7 | 0.000196 | | |
| WBC013A09 | 9 | 5.04E−05 | 11 | 6.13E−05 | 14 | 0.006365 | | |
| WBC010F04 | 4 | 5.04E−05 | 7 | 4.2E−05 | 9 | 1.68E−08 | 14 | 0.035866 |
| B1961109 | 0 | 5.05E−05 | 2 | 1.51E−05 | 4 | 0.03924 | 7 | 1.31E−05 |
| WBC001F08 | 7 | 5.49E−05 | 9 | 2.05E−05 | 11 | 0.006456 | 14 | 2.88E−06 |
| BM734457 | 7 | 5.65E−05 | 9 | 2.45E−06 | 14 | 0.004615 | | |
| WBC166 | 9 | 6.43E−05 | 11 | 0.000632 | 14 | 0.000648 | | |
| WBC024B05 | 7 | 8.41E−05 | 9 | 3.42E−09 | 11 | 2.11E−07 | 14 | 0.000172 |
| WBC004D07 | 9 | 8.87E−05 | 11 | 0.000708 | 14 | 0.002727 | | |
| WBC032B05 | 7 | 9.38E−05 | 9 | 1.47E−05 | 11 | 1.22E−05 | 14 | 1.97E−06 |
| WBC021D01 | 7 | 0.000118 | 9 | 0.000841 | 14 | 0.001455 | | |
| WBC008F12 | 0 | 0.000119 | 2 | 2.32E−08 | 4 | 0.002886 | 7 | 1.85E−08 |
| WBC027E07 | 0 | 0.000152 | 2 | 0.009696 | 7 | 0.003137 | | |
| BM735102 | 0 | 0.000152 | 7 | 0.000595 | 9 | 0.034995 | | |
| WBC041B05 | 9 | 0.000158 | 11 | 0.025083 | 14 | 0.022571 | | |
| WBC039F12 | 0 | 0.00019 | 2 | 3.68E−05 | 7 | 5.79E−09 | | |
| BM735286 | 0 | 0.000203 | 2 | 2.5E−05 | 4 | 0.015183 | 7 | 9.79E−05 |
| WBC493 | 7 | 0.000215 | 9 | 0.000323 | 11 | 0.002796 | 14 | 6.25E−05 |
| WBC001C11 | 9 | 0.000252 | 11 | 0.002114 | 14 | 0.027481 | | |
| WBC019B05 | 0 | 0.000256 | 2 | 5.5E−05 | 4 | 0.000479 | 7 | 1.87E−12 |
| GI9717252 | 2 | 0.000267 | 7 | 0.001244 | 11 | 0.005664 | | |
| WBC043G11 | 7 | 0.000268 | 9 | 0.003323 | 14 | 0.003005 | | |
| Foe545 | 9 | 0.00027 | 11 | 0.008383 | 14 | 0.000604 | | |
| BM735519 | 0 | 0.000272 | 2 | 9.28E−07 | 7 | 0.001646 | | |
| BM735409 | 0 | 0.0003 | 4 | 0.005135 | 7 | 3.7E−09 | | |
| WBC004C03 | 0 | 0.0003 | 2 | 0.000373 | 7 | 1.14E−06 | 9 | 0.015975 |
| WBC001A07 | 9 | 0.000309 | 11 | 0.031959 | 14 | 0.011618 | | |
| BM734719 | 2 | 0.000313 | 4 | 1.5E−05 | 7 | 2.69E−06 | 9 | 0.00355 |
| WBC018B01 | 7 | 0.000344 | 9 | 0.048555 | 14 | 0.015517 | | |
| Foe1072 | 7 | 0.000351 | 9 | 1.38E−05 | 14 | 0.028866 | | |
| B1961494 | 7 | 0.000382 | 11 | 1.52E−06 | 14 | 9.11E−06 | | |
| WBC007G03 | 9 | 0.000385 | 11 | 0.026939 | 14 | 0.013456 | | |
| WBC004E04 | 7 | 0.000412 | 9 | 2.33E−09 | 11 | 7.14E−07 | 14 | 2.53E−05 |
| BM735545 | 0 | 0.000476 | 2 | 1.02E−06 | 4 | 1.1E−05 | 7 | 0.001412 |
| BM735167 | 2 | 0.000484 | 7 | 9.77E−05 | 9 | 6.49E−13 | 11 | 1.52E−05 |
| B1960933 | 7 | 0.000506 | 9 | 0.007447 | 11 | 0.048364 | | |
| BM735441 | 0 | 0.000541 | 2 | 0.00586 | 7 | 0.000179 | | |
| Foe1060 | 9 | 0.000551 | 11 | 0.010201 | 14 | 0.02297 | | |
| WBC590 | 9 | 0.000596 | 11 | 0.02401 | 14 | 0.001841 | | |
| WBC001H09 | 7 | 0.00061 | 9 | 0.021894 | 14 | 0.022122 | | |
| WBC027D07 | 0 | 0.000667 | 2 | 1.12E−06 | 4 | 3E−05 | 7 | 8.55E−015 |
| WBC013C03 | 9 | 0.000778 | 11 | 0.000615 | 14 | 0.002414 | | |
| WBC024C11 | 2 | 0.000799 | 4 | 4.91E−06 | 7 | 4E−10 | 9 | 1.81E−06 |
| WBC016A12 | 0 | 0.000806 | 2 | 0.005596 | 4 | 0.026774 | 7 | 0.000604 |
| BM781186 | 0 | 0.000863 | 2 | 0.000524 | 4 | 0.002977 | 7 | 0.016418 |
| WBC012G02 | 7 | 0.000863 | 9 | 0.000161 | 14 | 0.000843 | | |
| BM781417 | 0 | 0.000961 | 7 | 0.0002 | 9 | 0.002666 | 11 | 0.012894 |

| Gene Name | Day | P. Value | Day | P. Value | Day | P. Value |
|---|---|---|---|---|---|---|
| BM734889 | | | | | | |
| WBC005D02 | | | | | | |
| BM734862 | | | | | | |
| B1961941 | | | | | | |
| WBC001C12 | | | | | | |
| BM735487 | | | | | | |
| BM734722 | 9 | 0.005597 | 11 | 0.007828 | | |
| WBC008F06 | | | | | | |
| B1961620 | 9 | 0.000103 | 11 | 0.012906 | 14 | 0.00011 |
| BM735585 | | | | | | |
| WBC022F08 | | | | | | |
| BM735573 | | | | | | |
| B1961682 | | | | | | |
| WBC021B08 | | | | | | |
| WBC032G05 | | | | | | |
| BM781178 | | | | | | |
| gi576646 | 9 | 9.62E−07 | 14 | 5.64E−05 | | |
| GI1592834 | | | | | | |
| B1961443 | | | | | | |
| WBC030C04 | 9 | 3.84E−05 | 14 | 0.035821 | | |
| BM781334 | | | | | | |
| B1961885 | | | | | | |
| BM781174 | | | | | | |
| WBC434 | 11 | 0.001727 | | | | |
| B1961671 | 9 | 4.37E−05 | 11 | 0.02579 | 14 | 3.46E−05 |
| WBC024F08 | 17 | 0.021939 | | | | |
| WBC007G12 | | | | | | |
| WBC001F11 | | | | | | |
| WBC003D11 | | | | | | |
| WBC022B05 | | | | | | |
| BM780906 | | | | | | |
| WBC012F07 | | | | | | |
| BM734865 | 11 | 0.00057 | 14 | 0.046599 | | |
| WBC014G08 | | | | | | |
| WBC028C01 | | | | | | |
| WBC013E10 | | | | | | |
| WBC009B10 | | | | | | |
| BM734654 | | | | | | |
| BM735536 | 9 | 2.01E−11 | 11 | 0.000125 | | |
| WBC003F02 | | | | | | |
| WBC012E07 | 14 | 0.000272 | | | | |
| WBC014H06 | | | | | | |
| BM735576 | | | | | | |
| BM735352 | | | | | | |
| WBC007A09 | 11 | 0.000195 | | | | |
| BM735457 | | | | | | |
| WBC005F10 | | | | | | |
| WBC020B04 | | | | | | |
| WBC028E07 | | | | | | |
| BM735534 | 9 | 0.045945 | | | | |
| WBC038G11 | | | | | | |
| B1961711 | | | | | | |
| B1961637 | | | | | | |
| WBC024C12 | | | | | | |
| BM735450 | | | | | | |
| WBC006H06 | | | | | | |
| WBC013H03 | | | | | | |
| WBC030D02 | | | | | | |
| WBC006E03 | | | | | | |
| WBC022B06 | | | | | | |
| WBC028F05 | 9 | 7.18E−07 | 11 | 7.49E−05 | | |
| WBC009E12 | | | | | | |
| WBC003H01 | | | | | | |
| WBC026E02 | | | | | | |
| WBC018D05 | | | | | | |
| BM735166 | | | | | | |
| WBC028D09 | | | | | | |
| BM734531 | | | | | | |
| WBC013A09 | | | | | | |
| WBC010F04 | | | | | | |
| B1961109 | 9 | 0.000187 | 11 | 8.7E−05 | 14 | 0.046035 |
| WBC001F08 | | | | | | |
| BM734457 | | | | | | |
| WBC166 | | | | | | |
| WBC024B05 | | | | | | |
| WBC004D07 | | | | | | |
| WBC032B05 | | | | | | |
| WBC021D01 | | | | | | |
| WBC008F12 | | | | | | |
| WBC027E07 | | | | | | |
| BM735102 | | | | | | |
| WBC041B05 | | | | | | |
| WBC039F12 | | | | | | |
| BM735286 | 11 | 0.018883 | | | | |
| WBC493 | | | | | | |
| WBC001C11 | | | | | | |
| WBC019B05 | 9 | 8.09E−08 | 11 | 0.000637 | 14 | 1.43E−05 |
| GI9717252 | | | | | | |
| WBC043G11 | | | | | | |
| Foe545 | | | | | | |
| BM735519 | | | | | | |
| BM735409 | | | | | | |
| WBC004C03 | 14 | 0.008483 | | | | |
| WBC001A07 | | | | | | |
| BM734719 | 11 | 0.012181 | | | | |
| WBC018B01 | | | | | | |
| Foe1072 | | | | | | |
| B1961494 | | | | | | |
| WBC007G03 | | | | | | |
| WBC004E04 | | | | | | |
| BM735545 | 11 | 0.007853 | 14 | 0.036358 | | |
| BM735167 | | | | | | |
| B1960933 | | | | | | |
| BM735441 | | | | | | |
| Foe1060 | | | | | | |
| WBC590 | | | | | | |
| WBC001H09 | | | | | | |
| WBC027D07 | 9 | 2.94E−06 | 11 | 0.001128 | 14 | 2.75E−07 |
| WBC013C03 | | | | | | |
| WBC024C11 | 14 | 8.89E−06 | | | | |
| WBC016A12 | 9 | 0.002168 | | | | |
| BM781186 | | | | | | |
| WBC012G02 | | | | | | |
| BM781417 | 14 | 0.004028 | | | | |

TABLE 6
GENE PRIORITY ORDER BASED ON T VALUE

| Gene Name | Day | M | t | P. Value | B |
|---|---|---|---|---|---|
| WBC008F06_V1.3_at | 9 | −0.53075 | −7.92738 | 8.8E−10 | 21.27623 |
| WBC007G12_V1.3_at | 0 | −0.34772 | −6.96751 | 2.09E−07 | 16.05095 |
| WBC001F11_V1.3_at | 9 | −0.53926 | −6.96303 | 2.15E−07 | 16.03718 |
| WBC014G08_V1.3_at | 9 | −0.50112 | −6.67446 | 1.04E−06 | 14.53887 |
| WBC013E10_V1.3_at | 2 | −0.44979 | −6.64137 | 1.24E−06 | 14.37086 |
| WBC012E07_V1.3_at | 0 | −0.46294 | −6.47256 | 3.05E−06 | 13.50699 |
| WBC024C12_V1.3_at | 0 | −0.44376 | −6.12738 | 1.85E−05 | 11.79847 |
| WBC006H06_V1.3_at | 7 | −0.42431 | −6.11448 | 1.97E−05 | 11.73829 |
| WBC030D02_V1.3_at | 7 | −0.47564 | −6.08505 | 2.28E−05 | 11.59508 |
| WBC006E03_V1.3_at | 9 | −0.48246 | −6.03644 | 2.92E−05 | 11.35935 |
| WBC028F05_V1.3_at | 0 | −0.48118 | −6.02243 | 3.15E−05 | 11.29056 |
| WBC009E12_V1.3_at | 9 | −0.7531 | −6.01545 | 3.25E−05 | 11.25809 |
| WBC018D05_V1.3_at | 7 | −0.51854 | −6.00257 | 3.47E−05 | 11.19618 |
| WBC010F04_V1.3_at | 4 | −0.76635 | −5.9324 | 5.04E−05 | 10.76647 |
| WBC013A09_V1.3_at | 9 | −0.32137 | −5.92857 | 5.04E−05 | 10.84143 |
| WBC001F08_V1.3_at | 7 | −0.31702 | −5.91162 | 5.49E−05 | 10.76031 |
| WBC166.gRSP.V1.3_at | 9 | −0.70207 | −5.87988 | 6.43E−05 | 10.60961 |
| WBC024B05_V1.3_at | 7 | −0.4822 | −5.82594 | 8.41E−05 | 10.35363 |
| WBC004D07_V1.3_at | 9 | −0.38487 | −5.81519 | 8.87E−05 | 10.30359 |
| WBC032B05_V1.3_at | 7 | −0.42227 | −5.80372 | 9.38E−05 | 10.24879 |
| WBC021D01_V1.3_at | 7 | −0.37385 | −5.75613 | 0.000118 | 10.02519 |
| WBC041B05_V1.3_at | 9 | −0.60661 | −5.69821 | 0.000158 | 9.755808 |
| WBC493.V1.3_at | 7 | −0.75113 | −5.63393 | 0.000215 | 9.456588 |
| WBC001C11_V1.3_s_at | 9 | −0.459 | −5.60169 | 0.000252 | 9.309492 |
| WBC019B05_V1.3_at | 0 | −0.57447 | −5.60118 | 0.000256 | 9.309371 |
| Foe545.V1.3_at | 9 | −0.40775 | −5.58788 | 0.00027 | 9.246056 |
| WBC043G11_V1.3_at | 7 | −0.3362 | −5.58774 | 0.000268 | 9.243826 |
| WBC004C03_V1.3_at | 0 | −0.41087 | −5.56794 | 0.0003 | 9.157128 |
| WBC001A07_V1.3_at | 9 | −0.53398 | −5.55969 | 0.000309 | 9.116868 |
| BM734719.V1.3_at | 2 | −0.41143 | −5.55799 | 0.000313 | 9.108264 |
| WBC018B01_V1.3_at | 7 | −0.67086 | −5.53604 | 0.000344 | 9.00706 |
| Foe1072.V1.3_at | 7 | −0.49276 | −5.5316 | 0.000351 | 8.986814 |
| WBC007G03_V1.3_at | 9 | −0.77183 | −5.51378 | 0.000385 | 8.90749 |
| WBC004E04_V1.3_at | 7 | −0.3488 | −5.4981 | 0.000412 | 8.834262 |
| Foe1060.V1.3_at | 9 | −0.4171 | −5.43881 | 0.000551 | 8.568091 |
| WBC590.V1.3_at | 9 | −0.46943 | −5.42207 | 0.000596 | 8.492765 |
| WBC001H09_V1.3_at | 7 | −0.55531 | −5.41491 | 0.00061 | 8.458322 |
| WBC027D07_V1.3_at | 0 | −0.39411 | −5.40118 | 0.000667 | 8.402682 |
| WBC013C03_V1.3_at | 9 | −0.29677 | −5.36572 | 0.000778 | 8.240336 |
| WBC024C11_V1.3_at | 2 | −0.29424 | −5.36158 | 0.000799 | 8.220603 |
| WBC016A12_V1.3_at | 0 | −0.48188 | −5.36119 | 0.000806 | 8.224168 |
| WBC012G02_V1.3_at | 7 | −0.53236 | −5.34123 | 0.000863 | 8.128662 |
| BM781417.V1.3_at | 0 | −0.54661 | −5.32386 | 0.000961 | 8.05831 |
| BM781186.V1.3_at | 0 | 0.607083 | 5.346723 | 0.000863 | 8.159792 |
| BM735441.V1.3_at | 0 | 0.253862 | 5.44514 | 0.000541 | 8.600034 |
| B1960933.V1.3_at | 7 | 0.716823 | 5.454949 | 0.000506 | 8.638769 |
| BM735167.V1.3_at | 2 | 0.414248 | 5.46725 | 0.000484 | 8.695428 |
| BM735545.V1.3_at | 0 | 0.589494 | 5.471981 | 0.000476 | 8.721067 |
| B1961494.V1.3_at | 7 | 0.354654 | 5.513986 | 0.000382 | 8.906528 |
| BM735409.V1.3_at | 0 | 0.269757 | 5.568459 | 0.0003 | 9.159479 |
| BM735519.V1.3_at | 0 | 0.323515 | 5.588238 | 0.000272 | 9.250006 |
| GI9717252-3M_at | 2 | 0.63348 | 5.591229 | 0.000267 | 9.260645 |
| BM735286.V1.3_at | 0 | 0.247435 | 5.648946 | 0.000203 | 9.529213 |
| WBC039F12_V1.3_at | 0 | 0.351171 | 5.66273 | 0.00019 | 9.592888 |
| BM735102.V1.3_at | 0 | 0.356539 | 5.707416 | 0.000152 | 9.800038 |
| WBC027E07_V1.3_at | 0 | 0.290616 | 5.708292 | 0.000152 | 9.804113 |
| WBC008F12_V1.3_at | 0 | 0.269626 | 5.75662 | 0.000119 | 10.02939 |
| BM734457.V1.3_at | 7 | 0.430304 | 5.905849 | 5.65E−05 | 10.73278 |
| B1961109.V1.3_at | 0 | 0.72204 | 5.929105 | 5.05E−05 | 10.84356 |
| BM734531.V1.3_at | 0 | 0.633646 | 5.932699 | 4.96E−05 | 10.86069 |
| WBC028D09_V1.3_at | 0 | 0.291809 | 5.937444 | 4.84E−05 | 10.88332 |
| BM735166.V1.3_at | 0 | 0.357974 | 5.981577 | 3.88E−05 | 11.09433 |
| WBC026E02_V1.3_at | 0 | 0.339222 | 6.005673 | 3.43E−05 | 11.20996 |
| WBC003H01_V1.3_at | 0 | 0.398243 | 6.012941 | 3.31E−05 | 11.24489 |
| WBC022B06_V1.3_at | 2 | 0.431945 | 6.027528 | 3.06E−05 | 11.31647 |
| WBC013H03_V1.3_at | 0 | 0.472666 | 6.093231 | 2.2E−05 | 11.6326 |
| BM735450.V1.3_at | 0 | 0.292831 | 6.119368 | 1.92E−05 | 11.75951 |
| B1961637.V1.3_at | 2 | 0.525483 | 6.147262 | 1.66E−05 | 11.89799 |
| B1961711.V1.3_at | 0 | 0.364045 | 6.152405 | 1.62E−05 | 11.92041 |
| WBC038G11_V1.3_at | 0 | 0.409732 | 6.174059 | 1.45E−05 | 12.02617 |
| BM735534.V1.3_at | 0 | 0.372736 | 6.209232 | 1.21E−05 | 12.19843 |
| WBC028E07_V1.3_at | 2 | 0.582508 | 6.220488 | 1.14E−05 | 12.25714 |
| WBC020B04_V1.3_at | 0 | 0.418213 | 6.266942 | 8.98E−06 | 12.48239 |
| WBC005F10_V1.3_at | 0 | 0.472342 | 6.27517 | 8.6E−06 | 12.523 |
| BM735457.V1.3_at | 2 | 0.410421 | 6.319517 | 6.8E−06 | 12.74701 |
| WBC007A09_V1.3_at | 0 | 0.568251 | 6.341687 | 6.08E−06 | 12.85253 |
| BM735352.V1.3_at | 2 | 0.628248 | 6.403566 | 4.38E−06 | 13.16644 |
| BM735576.V1.3_at | 0 | 0.472577 | 6.445128 | 3.53E−06 | 13.36913 |
| WBC014H06_V1.3_at | 2 | 0.785821 | 6.455537 | 3.33E−06 | 13.42745 |
| WBC003F02_V1.3_at | 7 | 0.367974 | 6.516236 | 2.42E−06 | 13.73495 |
| BM735536.V1.3_at | 0 | 1.024189 | 6.55447 | 1.97E−06 | 13.92057 |
| BM734654.V1.3_at | 0 | 0.802667 | 6.597475 | 1.57E−06 | 14.13893 |
| WBC009B10_V1.3_at | 2 | 0.664414 | 6.599032 | 1.55E−06 | 14.15456 |
| WBC028C01_V1.3_at | 0 | 0.290434 | 6.655002 | 1.15E−06 | 14.43232 |
| BM734865.V1.3_at | 0 | 0.656049 | 6.698282 | 9.12E−07 | 14.65401 |
| WBC012F07_V1.3_at | 0 | 0.584337 | 6.702508 | 8.91E−07 | 14.6757 |
| BM780906.V1.3_at | 0 | 0.416052 | 6.772214 | 6.11E−07 | 15.03457 |
| WBC022B05_V1.3_at | 2 | 0.646312 | 6.799413 | 5.27E−07 | 15.18522 |
| WBC003D11_V1.3_at | 2 | 1.337346 | 6.914252 | 2.81E−07 | 15.78363 |
| WBC024F08_V1.3_at | 2 | 0.518276 | 6.997403 | 1.78E−07 | 16.22033 |
| B1961671.V1.3_at | 0 | 0.453662 | 7.077614 | 1.14E−07 | 16.63083 |
| WBC434.gRSP.V1.3_at | 2 | 0.448914 | 7.087078 | 1.08E−07 | 16.69443 |
| BM781174.V1.3_at | 0 | 0.618002 | 7.120547 | 8.96E−08 | 16.85824 |
| B1961885.V1.3_at | 0 | 0.983887 | 7.169149 | 6.83E−08 | 17.11655 |
| BM781334.V1.3_at | 0 | 0.475758 | 7.183024 | 6.32E−08 | 17.19046 |
| WBC030C04_V1.3_at | 0 | 0.602389 | 7.22709 | 4.93E−08 | 17.42568 |
| B1961443.V1.3_at | 0 | 0.505935 | 7.272533 | 3.82E−08 | 17.66902 |
| GI1592834.V1.3_at | 0 | 0.611795 | 7.345617 | 2.53E−08 | 18.06199 |
| gi576646.V1.3_s_at | 0 | 1.280838 | 7.399041 | 1.87E−08 | 18.35048 |
| BM781178_unkn.V1.3_at | 0 | 0.386001 | 7.452231 | 1.38E−08 | 18.63874 |
| WBC032G05_V1.3_at | 0 | 0.596733 | 7.452338 | 1.38E−08 | 18.63932 |
| WBC021B08_V1.3_at | 2 | 0.792947 | 7.524122 | 9.14E−09 | 19.04904 |
| B1961682.V1.3_at | 0 | 0.545432 | 7.553677 | 7.71E−09 | 19.19129 |
| BM735573.V1.3_s_at | 0 | 0.483434 | 7.568776 | 7.07E−09 | 19.27384 |
| WBC022F08_V1.3_at | 0 | 0.553469 | 7.608824 | 5.61E−09 | 19.49316 |
| BM735585.V1.3_at | 0 | 0.402875 | 7.613483 | 5.47E−09 | 19.51871 |
| B1961620.V1.3_at | 0 | 0.584057 | 7.704254 | 3.23E−09 | 20.01797 |
| BM734722.V1.3_at | 0 | 0.736865 | 8.435653 | 4.27E−11 | 24.13395 |
| BM735487.V1.3_at | 0 | 0.445341 | 8.825278 | 4E−12 | 26.38603 |
| WBC001C12_V1.3_at | 9 | 0.76454 | 8.834995 | 3.77E−12 | 26.47277 |
| B1961941.V1.3_at | 0 | 0.478102 | 9.36128 | 1.45E−13 | 29.53961 |
| BM734862.V1.3_at | 0 | 0.727226 | 9.401378 | 1.13E−13 | 29.77781 |
| WBC005D02_V1.3_at | 0 | 0.680964 | 11.60693 | 8.19E−020 | 43.19762 |
| BM734889.V1.3_at | 0 | 1.083673 | 11.66465 | 5.62E−020 | 43.55399 |

The priority ranking of genes is based on increasing value of t value for the first day each gene is significant (p < 0.001) following stress induction, and for genes that were significant for at least three sampling times.

TABLE 7
TWO GENES SELECTED

| Genes | | Sensitivity | Specificity | Success |
|---|---|---|---|---|
| WBC001F11 | B1961443 | 0.926829268 | 0.802816901 | 0.881443299 |
| WBC030D02 | BM735536 | 0.918699187 | 0.802816901 | 0.87628866 |
| WBC030D02 | BM735536 | 0.918699187 | 0.802816901 | 0.87628866 |
| B1961443 | WBC027D07 | 0.910569106 | 0.816901408 | 0.87628866 |
| B1961443 | WBC030D02 | 0.910569106 | 0.816901408 | 0.87628866 |
| BM735536 | BM734865 | 0.886178862 | 0.816901408 | 0.860824742 |
| BM735536 | B1961494 | 0.894308943 | 0.802816901 | 0.860824742 |
| BM735409 | B1961443 | 0.926829268 | 0.746478873 | 0.860824742 |
| WBC010F04 | WBC003H01 | 0.918699187 | 0.76056338 | 0.860824742 |
| BM734865 | BM735536 | 0.886178862 | 0.816901408 | 0.860824742 |
| WBC001C11 | B1961443 | 0.918699187 | 0.746478873 | 0.855670103 |
| BM735576 | BM735536 | 0.902439024 | 0.774647887 | 0.855670103 |
| B1961443 | WBC030C04 | 0.886178862 | 0.802816901 | 0.855670103 |
| WBC004D07 | B1961443 | 0.894308943 | 0.774647887 | 0.850515464 |
| B1961443 | WBC003D11 | 0.869918699 | 0.816901408 | 0.850515464 |
| B1961443 | WBC004D07 | 0.894308943 | 0.774647887 | 0.850515464 |
| WBC012G02 | WBC028D09 | 0.894308943 | 0.774647887 | 0.850515464 |
| BM735536 | WBC019B05 | 0.886178862 | 0.788732394 | 0.850515464 |
| B1961443 | BM734719 | 0.886178862 | 0.788732394 | 0.850515464 |
| B1961443 | WBC021B08 | 0.886178862 | 0.788732394 | 0.850515464 |

TABLE 8
THREE GENES SELECTED

| Genes | | | Sensitivity | Specificity | Success |
|---|---|---|---|---|---|
| B1961443 | WBC004E04 | B1961620 | 0.910569106 | 0.873239437 | 0.896907216 |
| B1961443 | BM735441 | BM735536 | 0.943089431 | 0.802816901 | 0.891752577 |
| WBC003H01 | WBC004E04 | BM735536 | 0.93495935 | 0.802816901 | 0.886597938 |
| B1961443 | B1961494 | Foe545 | 0.910569106 | 0.845070423 | 0.886597938 |
| WBC028D09 | B1961443 | BM735487 | 0.918699187 | 0.830985915 | 0.886597938 |
| Foe545 | WBC013E10 | B1961443 | 0.93495935 | 0.802816901 | 0.886597938 |
| WBC027E07 | WBC010F04 | B1961443 | 0.910569106 | 0.830985915 | 0.881443299 |
| B1961109 | WBC013C03 | BM735536 | 0.910569106 | 0.816901408 | 0.87628866 |
| BM735487 | WBC028D09 | WBC021D01 | 0.894308943 | 0.845070423 | 0.87628866 |
| WBC041B05 | WBC028D09 | WBC019B05 | 0.910569106 | 0.816901408 | 0.87628866 |
| WBC030D02 | BM735536 | WBC018D05 | 0.902439024 | 0.816901408 | 0.871134021 |
| B1961443 | WBC030D02 | WBC012F07 | 0.910569106 | 0.802816901 | 0.871134021 |
| WBC003D11 | B1961620 | B1961443 | 0.894308943 | 0.830985915 | 0.871134021 |
| Foe545 | WBC007G03 | B1961443 | 0.918699187 | 0.788732394 | 0.871134021 |
| WBC003D11 | B1961443 | WBC590 | 0.894308943 | 0.830985915 | 0.871134021 |
| WBC003D11 | WBC001C12 | B1961443 | 0.894308943 | 0.816901408 | 0.865979381 |
| B1961443 | BM735585 | WBC001F11 | 0.894308943 | 0.816901408 | 0.865979381 |
| WBC009E12 | BM735536 | BM735167 | 0.894308943 | 0.816901408 | 0.865979381 |
| WBC028E07 | BM735536 | WBC493 | 0.902439024 | 0.802816901 | 0.865979381 |
| B1961682 | B1961443 | WBC493 | 0.910569106 | 0.788732394 | 0.865979381 |

TABLE 9
FOUR GENES SELECTED

| Genes | | | | Sensitivity | Specificity | Success |
|---|---|---|---|---|---|---|
| B1961443 | WBC019B05 | WBC024C12 | BM735585 | 0.93495935 | 0.85915493 | 0.907216495 |
| WBC006E03 | WBC030C04 | WBC003D11 | B1961443 | 0.926829268 | 0.85915493 | 0.902061856 |
| WBC021D01 | BM735536 | B1961443 | WBC020B04 | 0.93495935 | 0.845070423 | 0.902061856 |
| B1961443 | BM734862 | BM735536 | WBC007G03 | 0.93495935 | 0.845070423 | 0.902061856 |
| BM735536 | B1961671 | WBC038G11 | WBC003H01 | 0.93495935 | 0.830985915 | 0.896907216 |
| WBC027D07 | B1961711 | B1961443 | BM735487 | 0.926829268 | 0.830985915 | 0.891752577 |
| BM734722 | B1961443 | WBC028E07 | WBC030D02 | 0.886178862 | 0.901408451 | 0.891752577 |
| B1961885 | B1961443 | B1961620 | WBC041B05 | 0.910569106 | 0.85915493 | 0.891752577 |
| BM735536 | B1961109 | Foe545 | WBC001F11 | 0.910569106 | 0.845070423 | 0.886597938 |
| B1960933 | B1961885 | B1961443 | WBC012G02 | 0.902439024 | 0.85915493 | 0.886597938 |
| WBC007A09 | WBC166 | WBC028D09 | WBC005F10 | 0.910569106 | 0.845070423 | 0.886597938 |
| B1961443 | BM735457 | WBC030C04 | WBC008F06 | 0.886178862 | 0.873239437 | 0.881443299 |
| WBC024F08 | BM735536 | WBC022B05 | B1961109 | 0.902439024 | 0.845070423 | 0.881443299 |
| WBC019B05 | BM735167 | WBC008F12 | BM735102 | 0.894308943 | 0.85915493 | 0.881443299 |
| WBC028F05 | WBC003H01 | B1961443 | BM735536 | 0.918699187 | 0.816901408 | 0.881443299 |
| WBC005D02 | BM781174 | WBC028D09 | WBC166 | 0.910569106 | 0.830985915 | 0.881443299 |
| GI1592834 | BM735534 | B1961443 | WBC004E04 | 0.902439024 | 0.845070423 | 0.881443299 |
| WBC001F08 | BM734457 | B1961443 | WBC039F12 | 0.902439024 | 0.830985915 | 0.87628866 |
| WBC010F04 | WBC007G03 | BM735102 | B1961443 | 0.918699187 | 0.802816901 | 0.87628866 |
| BM735536 | WBC038G11 | BM781334 | BM734865 | 0.894308943 | 0.845070423 | 0.87628866 |

TABLE 10
FIVE GENES SELECTED

| Genes | | | | | Sensitivity | Specificity | Success |
|---|---|---|---|---|---|---|---|
| Foe1072 | BM735441 | B1961885 | B1961443 | WBC009B10 | 0.926829268 | 0.887323944 | 0.912371134 |
| B1961885 | WBC041B05 | BM735534 | B1961443 | WBC024F08 | 0.93495935 | 0.85915493 | 0.907216495 |
| BM735409 | WBC010F04 | B1961443 | B1960933 | BM734719 | 0.93495935 | 0.85915493 | 0.907216495 |
| WBC019B05 | B1961443 | WBC012E07 | BM735585 | WBC027D07 | 0.93495935 | 0.85915493 | 0.907216495 |
| B1961885 | B1961443 | WBC003D11 | WBC041B05 | WBC006E03 | 0.926829268 | 0.85915493 | 0.902061856 |
| WBC003F02 | B1961443 | BM735167 | WBC032G05 | WBC493 | 0.918699187 | 0.873239437 | 0.902061856 |
| BM734719 | WBC024C11 | WBC010F04 | B1961443 | B1961941 | 0.943089431 | 0.830985915 | 0.902061856 |
| WBC013C03 | BM735536 | WBC032G05 | WBC019B05 | WBC166 | 0.93495935 | 0.845070423 | 0.902061856 |
| BM735487 | WBC027D07 | WBC016A12 | WBC001F11 | B1961443 | 0.926829268 | 0.845070423 | 0.896907216 |
| BM781334 | B1961443 | WBC019B05 | WBC026E02 | WBC032G05 | 0.918699187 | 0.85915493 | 0.896907216 |
| WBC030C04 | BM734889 | WBC001F08 | B1961443 | Foe1060 | 0.918699187 | 0.85915493 | 0.896907216 |
| WBC493 | B1961443 | WBC009E12 | BM735534 | BM734889 | 0.926829268 | 0.845070423 | 0.896907216 |
| BM734719 | WBC003H01 | WBC014G08 | B1961443 | BM735534 | 0.894308943 | 0.901408451 | 0.896907216 |
| BM781334 | BM734889 | BM735536 | BM735534 | WBC013C03 | 0.918699187 | 0.845070423 | 0.891752577 |
| WBC001A07 | BM735487 | WBC030D02 | WBC013A09 | B1961443 | 0.910569106 | 0.85915493 | 0.891752577 |
| WBC016A12 | WBC038G11 | B1961443 | WBC010F04 | WBC004E04 | 0.926829268 | 0.830985915 | 0.891752577 |
| WBC004C03 | B1961443 | WBC027E07 | WBC001F11 | WBC010F04 | 0.910569106 | 0.845070423 | 0.886597938 |
| WBC032G05 | BM735573 | WBC003H01 | WBC004C03 | Foe545 | 0.926829268 | 0.816901408 | 0.886597938 |
| BM735536 | B1961682 | B1961494 | WBC009E12 | WBC021B08 | 0.918699187 | 0.830985915 | 0.886597938 |
| B1961443 | WBC013C03 | WBC030D02 | BM735457 | BM735534 | 0.902439024 | 0.85915493 | 0.886597938 |

TABLE 11
SIX GENES SELECTED

| Genes | | | | | | Sensitivity | Specificity | Success |
|---|---|---|---|---|---|---|---|---|
| WBC006H06 | B1961443 | BM735536 | WBC019B05 | WBC007G03 | WBC009E12 | 0.951219512 | 0.873239437 | 0.922680412 |
| WBC013C03 | BM781334 | WBC032G05 | BM735536 | WBC043G11 | WBC010F04 | 0.951219512 | 0.845070423 | 0.912371134 |
| B1961443 | WBC166 | WBC006H06 | WBC012E07 | BM735536 | BM735167 | 0.951219512 | 0.830985915 | 0.907216495 |
| WBC001H09 | BM735536 | WBC027D07 | WBC009B10 | WBC028D09 | B1961443 | 0.918699187 | 0.887323944 | 0.907216495 |
| WBC028D09 | WBC434 | Foe545 | WBC001F11 | B1961443 | BM735573 | 0.93495935 | 0.85915493 | 0.907216495 |
| BM781178 | B1961671 | WBC028D09 | WBC005F10 | BM781417 | BM735536 | 0.93495935 | 0.845070423 | 0.902061856 |
| WBC013E10 | WBC166 | BM781417 | BM735450 | B1961494 | B1961443 | 0.93495935 | 0.845070423 | 0.902061856 |
| WBC028F05 | BM735102 | BM735534 | B1961443 | WBC019B05 | B1961885 | 0.918699187 | 0.873239437 | 0.902061856 |
| WBC003H01 | BM734531 | B1961109 | gi576646 | WBC019B05 | BM735536 | 0.926829268 | 0.85915493 | 0.902061856 |
| BM735409 | BM735352 | BM735536 | WBC028D09 | WBC014H06 | BM734865 | 0.910569106 | 0.873239437 | 0.896907216 |
| WBC019B05 | B1961443 | WBC028F05 | WBC021D01 | WBC003D11 | WBC012E07 | 0.902439024 | 0.887323944 | 0.896907216 |
| WBC028D09 | BM781417 | WBC019B05 | BM735536 | WBC039F12 | WBC004D07 | 0.918699187 | 0.85915493 | 0.896907216 |
| WBC026E02 | Foe1072 | WBC008F06 | B1961885 | B1961443 | WBC028F05 | 0.910569106 | 0.873239437 | 0.896907216 |
| BM735536 | BM734457 | WBC028D09 | BM780906 | BM735487 | B1961671 | 0.910569106 | 0.873239437 | 0.896907216 |
| WBC028C01 | BM734722 | B1961620 | WBC013C03 | BM735534 | BM735536 | 0.918699187 | 0.85915493 | 0.896907216 |
| WBC493 | B1961682 | WBC001C11 | WBC012E07 | WBC003D11 | B1961443 | 0.918699187 | 0.85915493 | 0.896907216 |
| WBC005D02 | BM735536 | BM734457 | WBC003F02 | BM781334 | Foe545 | 0.93495935 | 0.830985915 | 0.896907216 |
| B1961443 | WBC021D01 | BM781417 | B1961494 | BM735585 | BM735457 | 0.910569106 | 0.85915493 | 0.891752577 |
| WBC434 | BM734457 | B1961443 | B1961941 | BM735534 | WBC030C04 | 0.93495935 | 0.816901408 | 0.891752577 |
| BM780906 | WBC030D02 | WBC001C12 | Foe545 | B1961443 | B1961109 | 0.918699187 | 0.845070423 | 0.891752577 |

TABLE 12
SEVEN GENES SELECTED

| Genes | | | | Sensitivity | Specificity | Success |
|---|---|---|---|---|---|---|
| BM735536 | WBC016A12 | B1961637 | B1961941 | 0.93495935 | 0.873239437 | 0.91237113 |
| B1961682 | Foe545 | WBC001F11 | BM734862 | 0.93495935 | 0.873239437 | 0.91237113 |
| BM734889 | B1961443 | WBC434 | Foe1072 | 0.93495935 | 0.873239437 | 0.91237113 |
| WBC006E03 | BM735573 | B1961443 | WBC001H09 | 0.943089431 | 0.85915493 | 0.91237113 |
| BM734862 | WBC013C03 | WBC032G05 | WBC004D07 | 0.93495935 | 0.85915493 | 0.90721649 |
| WBC004D07 | WBC003H01 | WBC001A07 | BM735487 | 0.926829268 | 0.873239437 | 0.90721649 |
| B1961443 | WBC012F07 | gi576646 | BM734862 | 0.943089431 | 0.845070423 | 0.90721649 |
| WBC003F02 | BM735536 | WBC003H01 | Foe545 | 0.943089431 | 0.830985915 | 0.90206186 |
| WBC005D02 | WBC028D09 | B1961637 | B1961443 | 0.894308943 | 0.915492958 | 0.90206186 |
| WBC014G08 | WBC007G12 | BM735102 | WBC001F08 | 0.951219512 | 0.816901408 | 0.90206186 |
| B1961494 | BM781334 | BM735585 | BM735536 | 0.926829268 | 0.85915493 | 0.90206186 |
| BM735585 | BM735102 | B1961443 | WBC001F11 | 0.910569106 | 0.887323944 | 0.90206186 |
| BM735536 | WBC001F08 | WBC004C03 | WBC007G12 | 0.93495935 | 0.845070423 | 0.90206186 |
| WBC038G11 | BM781334 | GI1592834 | WBC019B05 | 0.926829268 | 0.85915493 | 0.90206186 |
| B1961671 | B1961443 | WBC004C03 | WBC004D07 | 0.910569106 | 0.873239437 | 0.89690722 |
| WBC009B10 | WBC038G11 | B1961682 | B1961443 | 0.926829268 | 0.845070423 | 0.89690722 |
| BM735573 | WBC019B05 | WBC028E07 | WBC003H01 | 0.943089431 | 0.816901408 | 0.89690722 |
| WBC003H01 | WBC041B05 | B1961443 | BM735457 | 0.918699187 | 0.85915493 | 0.89690722 |
| Foe1072 | BM734865 | WBC026E02 | WBC010F04 | 0.910569106 | 0.873239437 | 0.89690722 |
| WBC027E07 | BM735536 | WBC008F06 | BM735450 | 0.918699187 | 0.85915493 | 0.89690722 |
| | Genes | | | Sensitivity | Specificity | Success |
| | B1961443 | BM734722 | WBC030D02 | 0.93495935 | 0.873239437 | 0.91237113 |
| | WBC003D11 | B1961443 | WBC028F05 | 0.93495935 | 0.873239437 | 0.91237113 |
| | WBC004C03 | B1961885 | WBC007G03 | 0.93495935 | 0.873239437 | 0.91237113 |
| | B1961682 | WBC019B05 | WBC022B06 | 0.943089431 | 0.85915493 | 0.91237113 |
| | WBC028D09 | WBC008F06 | BM735536 | 0.93495935 | 0.85915493 | 0.90721649 |
| | BM735536 | BM734865 | BM780906 | 0.926829268 | 0.873239437 | 0.90721649 |
| | WBC019B05 | WBC022B06 | WBC001F08 | 0.943089431 | 0.845070423 | 0.90721649 |
| | WBC003D11 | WBC004E04 | BM735573 | 0.943089431 | 0.830985915 | 0.90206186 |
| | WBC030D02 | BM735576 | BM735457 | 0.894308943 | 0.915492958 | 0.90206186 |
| | WBC006E03 | gi576646 | BM735536 | 0.951219512 | 0.816901408 | 0.90206186 |
| | WBC009B10 | B1961620 | WBC041B05 | 0.926829268 | 0.85915493 | 0.90206186 |
| | WBC008F06 | WBC003D11 | WBC027D07 | 0.910569106 | 0.887323944 | 0.90206186 |
| | B1961494 | B1961682 | BM735286 | 0.93495935 | 0.845070423 | 0.90206186 |
| | WBC027E07 | WBC007A09 | B1961671 | 0.926829268 | 0.85915493 | 0.90206186 |
| | BM735536 | WBC012E07 | WBC021D01 | 0.910569106 | 0.873239437 | 0.89690722 |
| | WBC001C11 | WBC006E03 | WBC030C04 | 0.926829268 | 0.845070423 | 0.89690722 |
| | WBC006H06 | BM735441 | BM734654 | 0.943089431 | 0.816901408 | 0.89690722 |
| | BM735585 | WBC007G12 | BM735441 | 0.918699187 | 0.85915493 | 0.89690722 |
| | B1961443 | WBC022B06 | WBC001F11 | 0.910569106 | 0.873239437 | 0.89690722 |
| | WBC013A09 | WBC032G05 | WBC007G03 | 0.918699187 | 0.85915493 | 0.89690722 |

TABLE 13
EIGHT GENES SELECTED

| Genes | | | | Sensitivity | Specificity | Success |
|---|---|---|---|---|---|---|
| B1961443 | B1961941 | WBC009E12 | BM735545 | 0.93495935 | 0.90140845 | 0.92268 |
| BM734865 | BM735536 | B1960933 | B1961443 | 0.943089431 | 0.88732394 | 0.92268 |
| BM735536 | B1961443 | BM734862 | WBC013C03 | 0.943089431 | 0.88732394 | 0.92268 |
| B1961109 | B1961443 | BM734654 | BM735576 | 0.943089431 | 0.87323944 | 0.917526 |
| WBC001C11 | B1961711 | BM734862 | BM735536 | 0.93495935 | 0.87323944 | 0.912371 |
| BM734531 | WBC041B05 | Foe545 | B1961620 | 0.926829268 | 0.88732394 | 0.912371 |
| WBC021D01 | WBC006H06 | B1961109 | WBC001F11 | 0.93495935 | 0.85915493 | 0.907216 |
| B1961443 | BM735573 | B1961885 | BM734457 | 0.926829268 | 0.87323944 | 0.907216 |
| WBC019B05 | B1961620 | WBC041B05 | WBC032B05 | 0.926829268 | 0.87323944 | 0.907216 |
| B1961885 | BM735573 | WBC028E07 | WBC026E02 | 0.910569106 | 0.90140845 | 0.907216 |
| BM735536 | WBC007G03 | BM734457 | WBC003H01 | 0.93495935 | 0.85915493 | 0.907216 |
| WBC010F04 | WBC493 | BM734719 | B1961682 | 0.918699187 | 0.88732394 | 0.907216 |
| WBC030C04 | B1961443 | WBC016A12 | BM735166 | 0.910569106 | 0.88732394 | 0.902062 |
| BM735441 | WBC009B10 | WBC003H01 | WBC003D11 | 0.93495935 | 0.84507042 | 0.902062 |
| WBC019B05 | WBC022B05 | B1961682 | WBC024C12 | 0.93495935 | 0.84507042 | 0.902062 |
| WBC001C11 | WBC007G12 | BM781334 | WBC030C04 | 0.910569106 | 0.88732394 | 0.902062 |
| WBC013H03 | WBC028D09 | B1961885 | WBC009E12 | 0.926829268 | 0.85915493 | 0.902062 |
| WBC005D02 | BM734865 | GI9717252-3M | WBC012E07 | 0.93495935 | 0.84507042 | 0.902062 |
| WBC013C03 | BM735536 | BM781178 | WBC003H01 | 0.943089431 | 0.83098592 | 0.902062 |
| B1961620 | GI1592834 | BM735585 | WBC009B10 | 0.902439024 | 0.90140845 | 0.902062 |
| Genes | | | | Sensitivity | Specificity | Success |
| BM735585 | BM735536 | BM734457 | WBC043G11 | 0.93495935 | 0.90140845 | 0.92268 |
| WBC027E07 | WBC007G12 | WBC019B05 | GI1592834 | 0.943089431 | 0.88732394 | 0.92268 |
| WBC028C01 | BM734719 | BM735286 | BM735585 | 0.943089431 | 0.88732394 | 0.92268 |
| WBC032G05 | WBC003D11 | WBC019B05 | WBC013C03 | 0.943089431 | 0.87323944 | 0.917526 |
| WBC039F12 | WBC004C03 | B1961443 | BM735166 | 0.93495935 | 0.87323944 | 0.912371 |
| WBC027D07 | B1961637 | WBC021B08 | B1961443 | 0.926829268 | 0.88732394 | 0.912371 |
| WBC019B05 | BM735536 | B1961443 | WBC005D02 | 0.93495935 | 0.85915493 | 0.907216 |
| WBC041B05 | WBC009B10 | B1961620 | WBC005F10 | 0.926829268 | 0.87323944 | 0.907216 |
| WBC013C03 | WBC013H03 | B1961443 | BM734531 | 0.926829268 | 0.87323944 | 0.907216 |
| WBC003H01 | BM735536 | WBC013C03 | B1961682 | 0.910569106 | 0.90140845 | 0.907216 |
| WBC041B05 | WBC016A12 | WBC022B06 | BM735573 | 0.93495935 | 0.85915493 | 0.907216 |
| WBC019B05 | WBC006H06 | B1961443 | WBC032G05 | 0.918699187 | 0.88732394 | 0.907216 |
| WBC019B05 | WBC005F10 | GI1592834 | B1961885 | 0.910569106 | 0.88732394 | 0.902062 |
| BM735536 | B1961671 | WBC010F04 | WBC027E07 | 0.93495935 | 0.84507042 | 0.902062 |
| WBC028E07 | B1961443 | GI9717252-3M | WBC001F08 | 0.93495935 | 0.84507042 | 0.902062 |
| BM781174 | BM735409 | BM735536 | WBC004D07 | 0.910569106 | 0.88732394 | 0.902062 |
| B1961941 | WBC005F10 | WBC001F11 | B1961671 | 0.926829268 | 0.85915493 | 0.902062 |
| BM735536 | WBC043G11 | BM735441 | WBC004D07 | 0.93495935 | 0.84507042 | 0.902062 |
| gi576646 | WBC028F05 | WBC003F02 | Foe545 | 0.943089431 | 0.83098592 | 0.902062 |
| WBC007G03 | BI961443 | BM781417 | gi576646 | 0.902439024 | 0.90140845 | 0.902062 |

TABLE 14
NINE GENES SELECTED

| Genes | | | | | Sensitivity | Specificity | Success |
|---|---|---|---|---|---|---|---|
| WBC019B05 | WBC003F02 | BM781334 | WBC004D07 | WBC013E10 | 0.95121951 | 0.901408 | 0.93299 |
| WBC028C01 | WBC001F08 | BM735536 | WBC013H03 | BM735573 | 0.95121951 | 0.859155 | 0.917526 |
| B1961443 | WBC007G03 | B1961109 | B1961637 | BM735585 | 0.92682927 | 0.887324 | 0.912371 |
| WBC001H09 | WBC020B04 | BM735536 | BM735102 | BM734531 | 0.92682927 | 0.887324 | 0.912371 |
| BM781186 | WBC001A07 | B1961443 | WBC019B05 | BM735167 | 0.91056911 | 0.915493 | 0.912371 |
| WBC024C12 | BM735536 | WBC016A12 | BM735102 | B1961443 | 0.93495935 | 0.873239 | 0.912371 |
| WBC018D05 | WBC010F04 | BM734722 | GI9717252-3M | WBC039F12 | 0.92682927 | 0.873239 | 0.907216 |
| WBC003H01 | WBC006H06 | WBC012G02 | WBC014H06 | WBC004C03 | 0.93495935 | 0.859155 | 0.907216 |
| WBC001A07 | BM735573 | WBC012G02 | B1961443 | WBC043G11 | 0.93495935 | 0.859155 | 0.907216 |
| WBC004C03 | WBC005D02 | BM734865 | WBC024B05 | BM735536 | 0.93495935 | 0.859155 | 0.907216 |
| BM735534 | BM735457 | WBC019B05 | BM735166 | WBC434 | 0.92682927 | 0.873239 | 0.907216 |
| WBC024B05 | BM735536 | WBC038G11 | WBC010F04 | BM735457 | 0.93495935 | 0.84507 | 0.902062 |
| WBC004D07 | B1961941 | WBC022B05 | WBC022B06 | BM735534 | 0.92682927 | 0.859155 | 0.902062 |
| WBC032G05 | BM735409 | WBC004C03 | WBC012F07 | B1961620 | 0.91056911 | 0.887324 | 0.902062 |
| B1961682 | BM735450 | WBC028F05 | BM735102 | B1961443 | 0.91056911 | 0.887324 | 0.902062 |
| WBC041B05 | BM735585 | B1961443 | WBC028E07 | WBC020B04 | 0.92682927 | 0.859155 | 0.902062 |
| Foe545 | Foe1060 | BM735536 | BM735167 | BM735585 | 0.92682927 | 0.859155 | 0.902062 |
| BM735536 | WBC038G11 | BM735534 | WBC004C03 | WBC003H01 | 0.91869919 | 0.873239 | 0.902062 |
| BM735166 | WBC003H01 | WBC043G11 | BM734722 | WBC022B05 | 0.92682927 | 0.859155 | 0.902062 |
| WBC012E07 | BM735167 | WBC004D07 | WBC013H03 | WBC019B05 | 0.94308943 | 0.830986 | 0.902062 |
| | Genes | | | | Sensitivity | Specificity | Success |
| | WBC434 | BI961443 | WBC010F04 | WBC007G03 | 0.95121951 | 0.901408 | 0.93299 |
| | WBC012F07 | WBC013A09 | WBC005F10 | BM735409 | 0.95121951 | 0.859155 | 0.917526 |
| | WBC001F08 | BM735450 | BM735536 | BM734457 | 0.92682927 | 0.887324 | 0.912371 |
| | WBC003H01 | BM735457 | WBC001A07 | WBC019B05 | 0.92682927 | 0.887324 | 0.912371 |
| | WBC022B05 | WBC013C03 | WBC018B01 | B1961941 | 0.91056911 | 0.915493 | 0.912371 |
| | Foe545 | WBC006H06 | WBC028C01 | WBC004E04 | 0.93495935 | 0.873239 | 0.912371 |
| | BM735519 | BM781174 | WBC019B05 | B1961443 | 0.92682927 | 0.873239 | 0.907216 |
| | WBC019B05 | WBC007A09 | WBC020B04 | BM735536 | 0.93495935 | 0.859155 | 0.907216 |
| | gi576646 | BM735536 | BM734719 | WBC024B05 | 0.93495935 | 0.859155 | 0.907216 |
| | WBC014H06 | WBC013C03 | WBC012E07 | BM734719 | 0.93495935 | 0.859155 | 0.907216 |
| | B1961443 | WBC038G11 | WBC005D02 | BM735585 | 0.92682927 | 0.873239 | 0.907216 |
| | Foe1072 | WBC003H01 | B1961443 | WBC006E03 | 0.93495935 | 0.84507 | 0.902062 |
| | B1961443 | WBC010F04 | BM735167 | WBC004E04 | 0.92682927 | 0.859155 | 0.902062 |
| | B1961443 | WBC019B05 | WBC021D01 | WBC016A12 | 0.91056911 | 0.887324 | 0.902062 |
| | WBC001F08 | WBC021D01 | BM735487 | WBC030C04 | 0.91056911 | 0.887324 | 0.902062 |
| | B1961637 | WBC013E10 | WBC010F04 | BM781178 | 0.92682927 | 0.859155 | 0.902062 |
| | WBC009E12 | GI1592834 | WBC024C12 | WBC006H06 | 0.92682927 | 0.859155 | 0.902062 |
| | BM735457 | WBC007G12 | B1961620 | WBC004D07 | 0.91869919 | 0.873239 | 0.902062 |
| | BM734531 | BM735536 | WBC008F06 | WBC434 | 0.92682927 | 0.859155 | 0.902062 |
| | WBC021B08 | B1961443 | WBC022F08 | BM735450 | 0.94308943 | 0.830986 | 0.902062 |

TABLE 15
TEN GENES SELECTED

| Genes | Sensitivity | Specificity | Success |
|---|---|---|---|
| BM735536; WBC030C04; WBC019B05; BM734531; WBC018B01; | 0.95122 | 0.859155 | 0.917526 |
| BM735166; WBC006E03; WBC007A09; WBC018D05; B1961885 | | | |
| BM734719; BM735534; B1961443; B1960933; WBC026E02; | 0.926829 | 0.901408 | 0.917526 |
| BM735536; BM735573;WBC022B05; WBC019B05; WBC001F11 | | | |
| WBC004D07; BM735450; WBC004C03; B1961711; Foe1072; | 0.934959 | 0.873239 | 0.912371 |
| WBC039F12; B1961443; WBC013H03; WBC032G05; WBC001F08 | | | |
| BM734531; WBC028C01; BM735536; BM734722; WBC019B05; | 0.943089 | 0.859155 | 0.912371 |
| WBC041B05; BM735166; WBC013H03; BM735487; WBC032G05 | | | |
| BM735102; WBC434; BM734531; WBC005D02; WBC007G03; | 0.934959 | 0.873239 | 0.912371 |
| WBC010F04; BM781417; BM735441; BM734719; B1961443 | | | |
| WBC032B05; WBC005F10; WBC028D09; B1961443; Foe1072; | 0.943089 | 0.859155 | 0.912371 |
| WBC027E07; WBC434; B1960933; BM734654; B1961885 | | | |
| WBC019B05; WBC043G11; B1961941; BM781186; B1961682; | 0.934959 | 0.859155 | 0.907216 |
| WBC018D05; WBC024C12; WBC012F07; WBC001F08; WBC003D11 | | | |
| WBC010F04; B1961443; BM735585; WBC434; WBC493; WBC022B06; | 0.926829 | 0.873239 | 0.907216 |
| WBC013H03; BM735352; WBC027D07; WBC001A07 | | | |
| BM734865; WBC021B08; BM735573; BM735536; WBC001F08; | 0.934959 | 0.859155 | 0.907216 |
| WBC007G03; B1961637; BM735519; WBC032G05; WBC001H09 | | | |
| WBC008F06; WBC434; B1961443; BM735487; WBC166; WBC012F07; | 0.934959 | 0.859155 | 0.907216 |
| BM735536; Foe1072; WBC007G12; WBC004D07 | | | |
| BM734862; BM734654; WBC001C12; Foe1072; BM734889; B1961443; | 0.934959 | 0.859155 | 0.907216 |
| BM735487; WBC039F12; BM735519; WBC001F08 | | | |
| WBC008F12; WBC001C12; WBC043G11; BM734862; Foe1060; | 0.943089 | 0.84507 | 0.907216 |
| WBC013C03; WBC022B05; WBC007G12; WBC009E12; BM735536 | | | |
| WBC021D01; BM781174; B1961443; Foe1060; BM781334; WBC024B05; | 0.910569 | 0.901408 | 0.907216 |
| Foe545; WBC028E07; WBC026E02; WBC005D02 | | | |
| WBC590; WBC010F04; BM735576; WBC021B08; BM735573; | 0.918699 | 0.887324 | 0.907216 |
| WBC003D11; WBC027D07; WBC008F12; Foe545; B1961443 | | | |
| WBC007G03; BM735585; B1961443; WBC009B10; GI1592834; | 0.910569 | 0.887324 | 0.902062 |
| BM734722; BM735536; BM735519; BM735409; WBC022B06 | | | |
| WBC043G11; BM781417; B1961443; WBC005F10; BM780906; | 0.910569 | 0.887324 | 0.902062 |
| BM735166; WBC028F05; BM735573; WBC019B05; WBC003D11 | | | |
| WBC493; BM735286; WBC004C03; BM735167; BM735536; BM734722; | 0.934959 | 0.84507 | 0.902062 |
| WBC003H01; BM735487; B1961711; BM735576 | | | |
| WBC006E03; WBC043G11; WBC024C11; BM735576; WBC004E04; | 0.926829 | 0.859155 | 0.902062 |
| WBC021B08; BM735536; WBC010F04; B1961443; WBC166 | | | |
| WBC020B04; BM781186; WBC003H01; BM781174; BM735573; | 0.918699 | 0.873239 | 0.902062 |
| BM735536; WBC028D09; B1961682; BM735519; WBC012E07 | | | |
| BM735536; WBC022B05; WBC590; BM735519; BM781174; | 0.926829 | 0.859155 | 0.902062 |
| B1961443; B1961494; WBC039F12; WBC005F10; WBC021B08 | | | |

TABLE 16
TWENTY GENES SELECTED

| Genes | Sensitivity | Specificity | Success |
|---|---|---|---|
| WBC013C03; WBC019B05; WBC041B05; B1961637; BM780906; | 0.95935 | 0.887324 | 0.93299 |
| WBC004C03; WBC030D02; WBC434; BM781178; WBC032G05; | | | |
| BM781186; WBC018B01; BM781334; B1961885; BM734722; WBC010F04; | | | |
| WBC030C04; WBC038G11; WBC012E07; WBC008F06 | | | |
| B1960933; WBC019B05; B1961443; WBC007A09; WBC010F04; | 0.95935 | 0.887324 | 0.93299 |
| WBC024C11; WBC434; WBC018D05; WBC013E10; WBC009E12; | | | |
| BM781186; WBC018B01; BM781334; B1961885; BM734722; WBC010F04; | | | |
| WBC030C04; WBC038G11; WBC012E07; WBC008F06 | | | |
| WBC013A09; BM735441; WBC028E07; WBC003D11; BM734531; | 0.95122 | 0.901408 | 0.93299 |
| BM735573; WBC028D09; WBC005F10; WBC030C04; WBC021B08; | | | |
| BM735487; BM781417; B1961494; B1961109; BM734531; WBC005D02; | | | |
| B1961637; WBC028E07; BM735352; BM735167 | | | |
| BM735536; WBC006H06; WBC018B01; WBC019B05; WBC003D11; | 0.943089 | 0.901408 | 0.927835 |
| BM735166; WBC009E12; BM735167; WBC493; BM735352; | | | |
| WBC028C01; WBC009B10; WBC014G08; WBC019B05; BM735585; | | | |
| BM735450; BM781334; BM735536; Foe545; WBC001C11 | | | |
| WBC019B05; BM734719; WBC434; WBC028F05; B1961443; | 0.934959 | 0.915493 | 0.927835 |
| BM735573; Foe1072; WBC001F08; BM735519; WBC013A09; BM781174; | | | |
| WBC043G11; WBC032G05; WBC041B05; WBC006E03; WBC001H09; | | | |
| WBC007G12; WBC004D07; B1961637; WBC004C03 | | | |
| BM734722; WBC030D02; BM735166; WBC022B06; BM735167; | 0.943089 | 0.887324 | 0.92268 |
| BM735441; WBC006E03; BM734531; WBC032G05; WBC012G02; | | | |
| WBC166; WBC021B08; WBC024F08; WBC013E10; BM734654; | | | |
| BM735409; BM734531; BM735536; WBC043G11; B1960933 | | | |
| WBC004E04; BM735536; WBC001F11; WBC018B01; WBC024F08; | 0.943089 | 0.887324 | 0.92268 |
| WBC009E12; WBC001F08; gi576646; BM735576; BM735457; | | | |
| BM735457; WBC024F08; WBC013C03; WBC018B01; WBC166; | | | |
| WBC001F08; BM735536; BM735409; Foe1060; WBC028F05 | | | |
| WBC008F12; WBC032G05; WBC010F04; WBC001F11; WBC018B01; | 0.95122 | 0.873239 | 0.92268 |
| B1960933; WBC012E07; BM735450; WBC022B06; BM735441; | | | |
| WBC019B05; WBC009B10; B1961109; BM734457; BM734531; | | | |
| BM735545; WBC001C12; WBC024C12; WBC006E03; BM781334 | | | |
| B1961443; WBC001A07; WBC013E10; B1960933; WBC005F10; | 0.943089 | 0.887324 | 0.92268 |
| Foe545; WBC012F07; WBC010F04; WBC004D07; BM735487; Foe545; | | | |
| WBC434; WBC019B05; BM735167; WBC028C01; BM735576; BM734862; | | | |
| WBC009B10; Foe1072; WBC012F07 | | | |
| WBC003H01; BM735457; WBC004C03; BM734457; WBC006H06; | 0.926829 | 0.915493 | 0.92268 |
| WBC020B04; B1961443; WBC019B05; BM735536; WBC038G11; | | | |
| BM734531; WBC027D07; WBC032G05; WBC004C03; WBC007G03; | | | |
| WBC032B05; WBC001F11; WBC003F02; BM735536; WBC003H01 | | | |
| WBC019B05; WBC018B01; BM734722; WBC030D02; B1961109; | 0.934959 | 0.901408 | 0.92268 |
| BM735536; GI1592834; WBC003D11; BM735573; WBC026E02; | | | |
| BM735573; BM734719; BM781417; WBC005D02; WBC012F07; | | | |
| WBC024C11; WBC004D07; BM735487; BM734865; WBC024B05 | | | |
| BM734865; BM735102; WBC001F08; B1961443; BM780906; | 0.926829 | 0.915493 | 0.92268 |
| Foe1072; WBC038G11; B1961637; WBC019B05; WBC024B05; | | | |
| WBC018D05; BM781178; WBC001F08; B1961443; WBC028F05; | | | |
| WBC013A09; WBC014G08; BM735487; Foe545; WBC012E07 | | | |
| B1961494; BM735536; WBC038G11; WBC004E04; WBC039F12; | 0.943089 | 0.887324 | 0.92268 |
| BM735167; WBC001F08; WBC004C03; BM734722; WBC019B05; | | | |
| WBC003H01; BM735457; BM735536; WBC043G11; WBC001C11; | | | |
| G19717252-3M; WBC004D07; WBC032G05; WBC016A12; WBC026E02 | | | |
| WBC003D11; BM734457; B1961443; BM735450; BM734531; | 0.918699 | 0.915493 | 0.917526 |
| WBC004C03; WBC012G02; BM734889; BM735585; WBC018B01; | | | |
| WBC07A09; GI1592834; BM781186; B1961682; BM734531; | | | |
| BM735352; WBC001H09; WBC493; WBC024B05; WBC005D02 | | | |
| WBC024C11; WBC001A07; WBC434; WBC032G05; WBC028E07; | 0.943089 | 0.873239 | 0.917526 |
| WBC004C03; WBC027D07; BM734531; gi576646; BM734654; | | | |
| WBC019B05; BM735409; BM735487; WBC005F10; WBC005D02; | | | |
| WBC014G08; WBC012F07; WBC0007G12; WBC010F04; B1961671 | | | |
| WBC009B10; Foe545; Foe1060; WBC027E07; WBC012G02; BM735457; | 0.943089 | 0.873239 | 0.917526 |
| WBC019B05; BM735409; GI1592834; WBC030C04; BM734457; | | | |
| WBC030C04; WBC010F04; WBC003H01; BM735102; BM735545; | | | |
| BM781417; BM781174; WBC014G08; WBC007A09 | | | |
| BM735441; WBC010F04; WBC008F12; BM735573; B1961443; | 0.934959 | 0.887324 | 0.917526 |
| WBC012F07; B1960933; WBC004D07; WBC043G11; WBC014H06; | | | |
| BM780906; WBC016A12; WBC041B05; BM781178; WBC010F04; | | | |
| WBC434; WBC005D02; WBC014H06; BM734865; WBC028D09 | | | |
| BM735573; WBC007G03; GI1592834; BM734722; B1961711; | 0.926829 | 0.901408 | 0.917526 |
| WBC021B08; BM735536; WBC493; WBC019B05; B1961443; WBC024C11; | | | |
| WBC006H06; WBC493; WBC013C03; BM734719; BM735487; | | | |
| WBC019B05; WBC024F08; WBC016A12; WBC004E04 | | | |
| WBC590; WBC028F05; BM735166; B1961885; BM735519; WBC018B01; | 0.943089 | 0.873239 | 0.917526 |
| WBC019B05; B1961637; WBC021B08; B1961941; WBC001F08; | | | |
| WBC026E02; BM735534; BM735585; WBC006E03; WBC004E04; | | | |
| WBC009B10; WBC008F12; Foe1072; WBC018B01 | | | |
| WBC027D07; BM735534; BM735487; BM781334; WBC013A09; | 0.926829 | 0.901408 | 0.917526 |
| WBC028D09; WBC590; WBC024F08; WBC024C12; B1961941; | | | |
| WBC006E03; WBC005D02; B1961711; WBC009E12; WBC003H01; | | | |
| WBC026E02; WBC166; WBC001F11; BM735536; BM735167 | | | |

TABLE 17
STRESS MARKER GENE ONTOLOGY

| Gene | Genbank Homology | UNIPROT | CELLULAR COMPONENT | MOLECULAR FUNCTION | BIOLOGICAL PROCESS |
|---|---|---|---|---|---|
| WBC590 | Zinc Finger Protein 198 | Q5W0T3 | nucleus | zinc ion binding | — |
| WBC493 | Homo sapiens mRNA; cDNA DKFZp667N084 | NA | | | |
| WBC434 | CGG triplet repeat binding protein 1 | O15183 | nucleus | double-stranded | — |
| | (CGGBP1), | | | DNA binding | |
| WBC166 | Mst3 and SOK1-related kinase (MASK) | Q9P289 | — | ATP binding, | protein amino acid |
| | | | | protein | phosphorylation |
| | | | | serine/threonine | |
| | | | | kinase activity, | |
| | | | | protein-tyrosine | |
| | | | | kinase activity | |
| WBC043G11.bFSP_20021401.esd | Homo sapiens high mobility group | Q53XL9 | — | — | — |
| | nucleosomal binding domain 4, mRNA | | | | |
| WBC041B05 | ARP3 actin-related protein 3 homolog (yeast) | Q59FV6 | — | — | — |
| WBC039F12 | Leu-8 pan leukocyte antigen | NA | | | |
| WBC038G11_V1.3_at | No Homology | NA | | | |
| WBC032G05 | Glycerol kinase (GK) | NA | | | |
| WBC032B05 | DDHD domain containing 1 | NA | | | |
| WBC030D02 | Putative membrane protein (GENX-3745 | Q9NY35 | — | — | — |
| | gene) | | | | |
| WBC030C04 | No homology | NA | | | |
| WBC028F05 | No homology | NA | | | |
| WBC028E07 | Homo sapiens cDNA FLJ13038 fis, clone | NA | | | |
| | NT2RP3001272, weakly similar to Mus | | | | |
| | musculus mRNA for macrophage actin- | | | | |
| | associated-tyrosine-phosphorylated | | | | |
| | protein | | | | |
| WBC028D09 | No homology | NA | | | |
| WBC028C01_V1.3_at | Ras homolog gene family, member A | Q5U024 | — | — | — |
| WBC027E07 | No homology | NA | | | |
| WBC027D07 | No homology | NA | | | |
| WBC026E02 | Migration-inducing gene 10 protein | Q5J7W1 | — | — | — |
| WBC024F08 | No homology | NA | | | |
| WBC024C12 | No homology | NA | | | |
| WBC024C11 | No homology | NA | | | |
| WBC024B05 | Adducin 3 (gamma) (ADD3), transcript | Q5VU08 | — | — | — |
| | variant 2 | | | | |
| WBC022F08 | Phosphogluconate dehydrogenase | P52209 | — | electron | pentose-phosphate |
| | | | | transporter | shunt, oxidative |
| | | | | activity | branch |
| WBC022B06 | Immunoglobulin superfamily, member 6 | NA | | | |
| | variant | | | | |
| WBC022B05 | Toll-like receptor 8 (TLR8) | Q9NR97 | integral to | receptor | detection of virus, |
| | | | membrane | activity, Toll | I-kappaB kinase/NF- |
| | | | | binding | kappaB cascade, |
| | | | | | innate immune |
| | | | | | response |
| WBC021D01 | No homology | NA | | | |
| WBC021B08 | Hypothetical protein FLJ20481 | Q7L5N7 | — | acyltransferase | metabolism |
| | | | | activity, calcium | |
| | | | | ion binding | |
| WBC020B04 | No homology | NA | | | |
| WBC019B05 | Homo sapiens mRNA; cDNA DKFZp686M2414 | NA | | | |
| WBC018B05 | Predicted: Mitogen-activated protein | NA | | | |
| | kinase kinase kinase 1 (MAP3K1) | | | | |
| WBC018B01_V1.3_s_at | Homo sapiens gene for JKTBP2, JKTBP1 | NA | | | |
| | (alternative splicing). | | | | |
| WBC016A12 | No homology | NA | | | |
| WBC014H06 | Homo sapiens mRNA; cDNA DKFZp564C012 | Q9H0V1 | — | — | — |
| WBC014G08_V1.3_at | RTN4-C (RTN4) | Q6IPN0 | endoplasmic | unknown | — |
| | | | reticulum | | |
| WBC013H03_V1.3_at | RAB6 interacting protein 1 (RAB6IP1) | Q6IQ26 | — | — | — |
| WBC013E10 | Homo sapiens cDNA FLJ45679 fis, clone | NA | | | |
| | ERLTF2001835 | | | | |
| WBC013C03_V1.3_at | Ras GTPase-activating-like protein | P46940 | actin filament | calmodulin | GTPase activator |
| | (IQGAP1) | | | binding | activity, GTPase |
| | | | | | inhibitor activity, |
| | | | | | signal transduction |
| WBC013A09 | Sialyltransferase 1 (beta-galactoside | P15907 | integral to | beta-galactoside | growth, humoral |
| | alpha-2,6-sialyltransferase), transcript | | membrane | alpha-2,6- | immune response, |
| | variant 2 | | | sialyltransferase | oligosaccharide |
| | | | | activity | metabolism, protein |
| | | | | | modification |
| WBC012G02 | Soc-2 suppressor of clear homolog (C. elegans) | Q5VZS9 | | | |
| WBC012F07 | Complement component 5 receptor 1 (C5a | NA | | | |
| | ligand) | | | | |
| WBC012E07 | Pinin, desmosome associated protein (PNN) | Q99738 | intercellular | structural | cell adhesion |
| | | | junction, | molecule activity | |
| | | | intermediate | | |
| | | | filament, plasma | | |
| | | | membrane | | |
| WBC010F04 | 3-hydroxy-3-methylglutaryl-Coenzyme A | Q01581 | cytoplasm, soluble | hydroxymethylglutaryl- | lipid metabolism |
| | synthase 1 (soluble) | | fraction | CoA synthase | |
| | | | | activity | |
| WBC009E12 | Down-regulator of transcription 1, TBP- | Q01658 | — | DNA binding, | Negative regulation |
| | binding (negative cofactor 2) | | | transcription | of transcription |
| | | | | corepressor | from RNA polymerase |
| | | | | activity, | II promoter |
| | | | | transcription | |
| | | | | factor binding | |
| WBC009B10_V1.3_at | Human mRNA for complement receptor type 1 | P17927 | integral to plasma | complement | complement |
| | (CR1, C3b/C4b receptor, CD35) | | membrane | receptor activity | activation |
| WBC008F12 | v-ral simian leukemia viral oncogene | Q7T383 | — | GTP binding | Small GTPase |
| | homolog B (ras related; GTP binding | | | | mediated signal |
| | protein | | | | transduction |
| WBC008F06_V1.3_at | No Homology | NA | | | |
| WBC007G12_V1.3_at | No Homology | NA | | | |
| WBC007G03 | Transmembrane protein 23 cDNA clone | Q86VZ5 | Cellular | ceramide | Sphingomyelin |
| | MGC: 17342 IMAGE: 4342258 also called | | component, | cholinephosphotransferase | biosynthesis |
| | Phosphatidylcholine:ceramide | | integral to golgi | activity | |
| | cholinephosphotransferase 1 | | | | |
| | (Sphingomyelin synthase 1) | | | | |
| | (Mob protein | | | | |
| WBC007A09 | No homology | NA | | | |
| WBC006H06 | Ubiquitin-conjugating enzyme E2B (RAD6 | | | | |
| | homolog) (UBE2B) | | | | |
| WBC006E03_V1.3_at | Homo sapiens methionine | | Intracellular | Protein binding | S-adenosylmethionine |
| | adenosyltransferase II, beta (MAT2B) | | | | biosynthesis |
| WBC005F10 | Polymeric immunoglobulin receptor 3 | Q8NHL4 | — | receptor activity | — |
| | precursor (PIGR3) | | | | |
| WBC005D02_V1.3_at | Homo sapiens hypothetical protein | Q6P4A8 | — | — | — |
| | FLJ22662, mRNA | | | | |
| WBC004E04 | TRAF-interacting protein with a forkhead- | Q96CG3 | nucleus | — | — |
| | associated domain | | | | |
| WBC004D07_V1.3_at | No Homology | NA | | | |
| WBC004B05 | Heterogeneous nuclear ribonucleoprotein F | P52597 | heterogeneous | RNA binding | RNA processing |
| | | | nuclear | | |
| | | | ribonucleoprotein | | |
| | | | complex | | |
| WBC004C03 | Dendritic cell protein variant, clone: | Q53HL6 | — | — | — |
| | CAE03638 | ?clone | | | |
| | | CAE03638 | | | |
| WBC003H01 | CGI-54 protein | Q9Y282 | — | — | — |
| WBC003F02 | IBR domain containing 3 (IBRDC3) | NA | | | |
| WBC003D11 | No homology | NA | | | |
| WBC001H09 | Activated RNA polymerase II transcription | Q59G24 | — | — | — |
| | cofactor 4 variant protein (incomplete) | | | | |
| WBC001F11 | Retinoblastoma-like 2 (p130) | Q08999 | — | protein binding | — |
| WBC001F08 | RAB10, member RAS oncogene family | P61026 | — | — | — |
| | (RAB10), | | | | |
| WBC001C12_V1.3_at | No Homology | NA | | | |
| WBC001C11 | ARP3 actin-related protein 3 homolog | Q59FV6 | — | — | — |
| (Same as WBC041B05) | (yeast) | | | | |
| WBC001A07_V1.3_at | No Homology | NA | | | |
| GI9717252 | Equus caballus Toll-like receptor 4 mRNA | Q5XWB9 | membrane | transmembrane | inflammatory |
| | | | | receptor activity | response |
| GI1592834 | Equus caballus gelsolin mRNA | Q6X9X6 | — | actin binding | — |
| Gi576646 | Equus caballus Ig epsilon heavy chain | NA | | | |
| | (partial) | | | | |
| Foe 545 | Homo sapiens mRNA; cDNA DKFZp666I186 | Q658M2 | — | — | — |
| | (from clone DKFZp666I186) | | | | |
| Foe 1072 | Transducin (beta)-like 1X-linked receptor 1 | NA | | | |
| Foe 1060 | Homo sapiens 15 kDa selenoprotein, | | Endoplasmic | Protein binding, | Post-translational |
| | transcript variant 1 | | reticulum lumen | Se binding | protein folding. |
| BM781417 | No homology | NA | | | |
| BM781334 | No homology | NA | | | |
| BM781186 | Membrane-spanning 4-domains, subfamily A, | | Integral to | Receptor activity | Signal transduction |
| | member 6A, transcript variant 1 | | membrane | | |
| BM781178 | No homology | NA | | | |
| BM781174 | GM2 ganglioside activator | | Lysosome | Sphingolipid | Lipid metabolism |
| | | | | activator protein | |
| | | | | activity | |
| BM780906.V1.3_at | No Homology | NA | | | |
| BM735585 | Fc-epsilon-receptor gamma-chain | | Integral to plasma | Receptor activity | Humoral response. |
| | | | membrane | | |
| BM735576 | Minor histocompatibility antigen H13 | | Integral to | Peptidase | D-alanyl-D-alanine |
| | isoform 1 (H13) | | membrane | activity | endopeptidase |
| | | | | | activity |
| BM735573 | No Homology | NA | | | |
| BM735545 | CD68 protein | | Lysosome, membrane | NA | NA |
| BM735536 | Transglutaminase E3 (TGASE3) | | NA | NA | NA |
| BM735534 | PREDICTED: Bos taurus similar to | | NA | NA | NA |
| | hypothetical protein (LOC515494), | | | | |
| BM735519 | Ring finger protein 10 | NA | | | |
| BM735487.V1.3_at | No Homology | NA | | | |
| BM735457 | No homology | NA | | | |
| BM735450 | Lymphocyte surface antigen precursor CD44 | | Type I membrane | Cell surface | Lymphocyte homing |
| | | | protein | receptor | |
| BM735441 | WD repeat domain 1, transcript variant 2 | | Cytoskeleton | Protein binding | Actin binding |
| BM735409 | No homology | NA | | | |
| BM735352 | No homology | NA | | | |
| BM735286 | Ferritin light chain | | Ferritin complex | Iron ion binding | Iron homeostasis |
| BM735167 | TAP2E | | NA | NA | NA |
| BM735166 | No homology | NA | | | |
| BM735102 | COP9 constitutive photomorphogenic | | Signalasome | Unknown | Unknown |
| | homolog subunit 7A | | complex | | |
| BM734889.V1.3_at | Equus caballus lipopolysaccharide | | Plasma membrane | Peptidoglycan | Apoptosis, signal |
| | receptor (CD14) mRNA | | | receptor activity | transduction, |
| | | | | | phagocytosis. |
| BM734865 | Nuclear receptor binding factor 1 | | NA | NA | NA |
| BM734862.V1.3_at | Triggering receptor expressed on myeloid | | Receptor activity | Humoral immune | Intracelluar |
| | cells 1 | | | response. | signalling cascade |
| BM734722 | No homology | NA | | | |
| BM734719 | No homology | NA | | | |
| BM734654 | No homology | NA | | | |
| BM734531 | No homology | NA | | | |
| BM734457 | High-risk human papilloma viruses E6 | | NA | NA | NA |
| | oncoproteins targeted protein E6TP1 beta | | | | |
| | mRNA | | | | |
| B1961941 | Fibroblast mRNA for aldolase A | | NA | Fructose- | Glycolysis |
| | | | | bisphosphate | |
| | | | | aldolase activity | |
| B1961885 | Tumor necrosis factor-inducible (TSG-6) | | Extracellular | Protein binding | Inflammtory |
| | mRNA fragment, adhesion receptor CD44 | | region | | response, cell |
| | putative CDS | | | | adhesion, protein |
| | | | | | binding. |
| B1961711.V1.3_at | No Homology | NA | | | |
| B1961682.V1.3_at | Formin homology 2 domain containing 1 | | Nucleus, cytoplasm | Actin binding | Cell organisation |
| | | | | | and biogenesis. |
| B1961671 | NAD synthetase 1 | | | ATP binding | NAD biosynthesis |
| B1961637 | Mn-SOD mRNA for manganese superoxide | | Mitochondrian | Superoxide | Response to |
| | dismutase | | | dismutase | oxidative stress |
| | | | | activity | |
| B1961620 | ILT11A mRNA for immunoglobulin-like | | NA | NA | NA |
| | transcript 11 protein | | | | |
| B1961494 | HREV107-3 | | NA | Tumor suppressor, | NA |
| | | | | associated with | |
| | | | | cell death. | |
| B1961443 | PREDICTED: Homo sapiens steroid receptor | | NA | NA | NA |
| | RNA activator 1 (SRA1) | | | | |
| B1961009 | G protein-coupled receptor HM74a | | Integral to | Receptor activity | G-protein coupled |
| | | | membrane | | receptor protein |
| | | | | | signaling pathway |
| B1960933 | Pleckstrin | | NA | Calcium ioni | NA |
| | | | | binding | |
| WBC037F12 | Selenoprotein P | | Extracellular | Selenium binding | Response to |
| | | | region | | oxidative stress |
| WBC043E03 | Ribosomal protein S3A | | Ribosome | Constitutive | Protein biosynthesis |
| | | | | component of | |
| | | | | ribosome | |
| Foe1019 | Hemoglobin, beta (HBB) | | | | Oxygen transport |
| Gi5441616 | Equus caballus mRNA for interferon gamma | | Extracellular | Cytokine activity | Interferon gamma |
| | inducing factor (IL-18) | | region | | induction |
| B1961054 | Interferon-gamma-inducible protein-10 | | Extracellular | Chemokine | Immune response. |
| | (IP-10) (Ovis aries) | | regioin | activity | |
| B1961539 | Calcium-binding protein in macrophages | | NA | Signal transducer | Cell-cell |
| | (MRP-14) macrophage migration inhibitory | | | activity | signalling, |
| | factor (MIF)-related protein | | | | inflammatory |
| | | | | | response. |
| BM735419 | Villin 2 (ezrin) | | Membrane bound, | Connection of | NA |
| | | | (extracellular) | cytoskeleton to | |
| | | | | plasma membrane | |
| WBC013G08 | cDNA FLJ16386 fis, clone TRACH2000862, | | NA | NA | NA |
| | moderately similar to Mus musculus | | | | |
| | putative purine nucleotide binding | | | | |
| | protein mRNA | | | | |
| B1961648 | Farnesyl diphosphate synthase (farnesyl | | Cyotplasmic | Catalytic | Cholesterol |
| | pyrophosphate synthetase, | | | | biosynthesis |
| | dimethylallyltranstransferase, | | | | |
| | geranyltranstransferase) | | | | |
| WBC041B04 | 56-KDa protein induced by interferon | NA | NA | NA | NA |
| WBC001B11 | No homology | NA | NA | NA | NA |
| WBC032B11 | Sphingosine-1-phosphate phosphatase 1 | | Endoplasmic | Enzymatic | Regulates S1P levels |
| | | | reticulum | activity | |
| B1961185 | Actin related protein 2/3 complex, | | ARP2/3 protein | Cytoskeleton | Cell motility |
| | subunit 1B, 41 kDA | | complex | | |
| B1961512 | No homology | NA | | | |
| WBC008D05 | No homology | NA | | | |
| WBC133 | No homology | NA | | | |
| BM781012 | Equus caballus immunogobulin gamma 1 | NA | NA | NA | NA |
| | heavy chain constant region (IGHC1 gene) | | | | |
| WBC005B09 | CDC-like kinase 1 | | | Non-membrane | Regulation of cell |
| | | | | spanning protein | cycle |
| | | | | tyrosine kinase | |
| | | | | activity | |
| WBC040E12 | Arachidonate 5-lipoxygenase-activating protein (ALOX5AP). | | Integral to | Enzyme activator | Inflammatory |
| | | | membrane | activity | response. |

LENGTHY TABLES
The patent application contains a lengthy table section. A copy of the table is available in electronic form from the USPTO web site (http://seqdata.uspto.gov/?pageRequest=docDetail&DocID=US20090081243A1). An electronic copy of the table will also be available from the USPTO upon request and payment of the fee set forth in 37 CFR 1.19(b)(3).

The application's sequence listing, which the Patent Office published only in electronic form, follows.

SEQUENCE LISTING (1807 sequences)

SEQ ID NO: 1 - DNA, 5050 bp, Unknown
  Zinc Finger Protein 198
cgaaggggggtgggccgggggaggggaggttcgttccgcggagcgcagccagaaccgggaccaagaatcgccttcagccctgtctggtgcatccttggcagaaagtgaggaggaaaacacccccattgttagatgaggtcttaatcatggaacatttgaagtcacgtaaagaaggttctttggcatggacacaagttcagtgggaggattagaattgactgatcagactcctgttttattagggagtacggccatggcaactagtctcacgaatgtaggaaactcatttagtggtccagctaatcctttagtgtctagatctaataagtttcagaactcgtcagtggaagatgatgatgatgttgtttttatcgaacctgtacaacctcccccaccttctgtaccagtggtagctgatcaaagaaccataacatttacatcatcaaaaaatgaagaactacaaggaaatgattccaaaattactccttcctcaaaagagttggcatctcagaagggaagtgtaagtgagacaattgtcattgatgatgaagaggacatggaaacaaatcaagggcaagagaaaaattcctccaattttattgaacgaagacctcctgagactaaaaacagaaccaatgatgtggatttctccacttccagtttttcaagaagtaaggtaaatgcaggaatgggtaatagtggtatcaccacagaaccagactctgaaattcagattgctaatgttacaactttagaaacaggtgtaagctctgtgaatgatggccaattagaaaatactgacgggcgagatatgaacttaatgattacacatgtaacatcactgcagaataccaacttgggagatgtctctaacggactgcagtcaagtaattttggtgttaatatacaaacatacaccccatctttaacttcacagaccaagactggagtaggaccttttaatcctggtagaatgaatgtggcaggagacgtttttcagaatggagaatctgcaactcatcataatcctgattcttggatctcccagtcagcttcatttccccgtaatcagaaacaaccaggggtggactctttatcaccagtggcctcacttcctaaacagattttccagccgtctgtccaacagcagcctactaaaccagttaaagtcacttgtgcaaactgcaaaaaacctttacagaagggccagacagcttatcaacgaaaaggatcagctcacctcttttgttctaccacctgcctttcttccttctcccacaagcctgctccaaagaaactctgtgttatgtgtaaaaaagatataactacaatgaaaggaaccattgttgctcaagtggattcaagtgagtccttccaggaattctgtagtacatcttgtttatctctctatgaagacaaacagaatcctactaaaggagctctaaataaatcaagatgtacaatctgtggtaaactaactgagattcgccatgaagtcagctttaaaaatatgactcataagctgtgcagtgaccactgctttaatagatatagaatggccaatggtttaataatgaattgctgtgaacagtgtggagagtacttgcccagtaaaggtgctggaaataatgttctggtgattgatggtcaacagaaaagattttgctgtcaaagttgtgtcagtgaatacaaacaggtaggtagccatccaagcttcctgaaggaggttcgagatcacatgcaggactctttcttaatgcagcctgagaaatatggaaaactgacaacttgtactggttgccgaacacagtgcaggttttttgatatgactcagtgtataggtcctaatggatatatggagccatattgttcaactgcttgtatgaacagtcacaagacaaaatatgcaaaatcacaaagtttgggaattatttgccatttttgtaagcgaaactctttacctcaataccaagccacaatgcctgatggaaaactgtacaacttttgcaattccagttgtgtggctaaatttcaggctctaagtatgcagtcatctccaaatggccagtttgtagcgccaagtgatattcagttgaaatgcaactactgcaaaaattccttttgttcaaaaccagaaatcctggaatgggagaacaaagtgcatcagttctgcagcaaaacttgttcagatgactataagaagttgcattgcatagttacatattgcgaatactgtcaagaggagaagactcttcatgaaacagtaaatttctctggcgttaagagacctttctgtagtgaaggctgcaaattattatacaaacaggattttgccagacgtttaggattgagatgtgttacttgcaactattgttctcagctatgtaagaagggagcaactaaagaactcgatggtgttgtgagagatttctgcagtgaagattgctgtaaaaaatttcaggattggtactacaaggctgcaaggtgtgactgttgtaaatctcaaggaactcttaaagagcgagttcagtggcgtggggaaatgaaacatttctgtgatcaacattgcttactgcgtttctactgtcaacaaaatgagcccaacatgacaactcagaaaggacctgaaaacttacattatgatcagggttgtcagacatctcgaaccaaaatgacaggttcagcaccacccccttctccaacacctaacaaagagatgaagaacaaagcagttctttgcaaacctttaacaatgacaaaagctacttactgtaaacctcacatgcagaccaaatcttgtcagacagatgatacttggaggacagaatatgttccagtgcctatccctgtgcctgtgtatatcccagttcctatgcacatgtacagtcagaatattcctgttcctactacagttcctgttcctgtgccagttcctgtttttctgcctgctccattggacagcagtgagaagattcctgcagcaattgaggagctaaaaagcaaggtttcttcagatgctcttgatacagagttgcttacaatgacggatatgatgagtgaagacgaggggaaaacagagacaaccaacatcaacagtgtaattattgaaacagatataattggttcagaccttttgaagaactctgacccagagacacagtccagcatgcctgatgtaccatatgaaccagatttggatatcgaaatagattttcccagagctgctgaggagcttgatatggaaaatgaatttttattaccacctgtttttggcgaagaatatgaggaacagcccagacctcgatctaaaaaaaagggagccaagagaaaggctgtatcaggataccagtctcatgatgatagttctgacaattcagaatgcagctttcctttcaaatatacgtatggcgtaaatgcatggaaacactgggtcaaaactaggcaacttgatgaagatcttctggtattagatgagttaaaatcttctaaatcagtaaagttaaaagaggatctactctctcacaccacagctgagcttaactatgggttagctcattttgtcaatgagatccgacggccaaatggagagaattatgcacctgacagcatctattacctttgccttggaatacaggagtatttgtgtggaagtaatcgaaaagacaacatatttattgatcctggataccaaacatttgagcaagaattgaataaaatactgcgaagctggcaaccaagcatacttccagatgggtcaatattctctcgagttgaagaagactatctctggaggataaaacaactaggatcacactctccagtagctcttctgaatacactgttctactttaacactaagtattttggcctgaaaacagtggaacaacacttaagactttcctttggcactgtgtttaggcattggaaaaaaaatcctttaacgatggaaaacaaagcgtgtcttcgataccaagtgtcttccttgtgtggaacagataatgaagataaaattactactggaaaaagaaaacatgaagatgatgagccagtatttgaacaaattgaaaacacagccaatccttccagatgtcctgtgaaaatgtttgaatgctacttgtctaaaagtccacagaatcttaatcagaggatggatgttttttatttgcaaccagaatgctctagttctacagatagccctgtctggtatacgtctacttcactggaccgaaacaccttggaaaatatgcttgtacgggttcttctagtaaaagatatttatgataaagacaattatgaactggatgaagacacagactaaaaaggaacgttgcagaagcaatcgggataaaacagcattagatagtcatgctgctagatctttattatggaaaacatttcaagtttactccttctgttttgagttttgtagcagtgtacccacgctgggtattaccatgtaaataatctgtgagtgaaagttgccattattctatgtagtggttttaggatacttaacaaatacattcaaattctttttttattattatttatttgattaggtatgtttgtaactttttacattacagaatatgaatgagaatgtgccatgtataatttttttcttgtagtaagaaacatccatattgcacaactctactgttgcaaagcttccttggaagggggctcttttactgggttcttaaccagatggttgtgtatgggtagcactactaaaagtttagaacttgcagtgtctttcggaatttttaaaataaactgtaaactaataggctggggtttttgttttgttttggggttttgttttgtttggttttacattttagttactgaagccttacaaggttatgtagagagataccatcttctgtaccaaaaatagacaagagaatgctgtcaatattggtgtactgtaatgtgaatctatgctggtgaaaacaattttttgttccccttattaaaaccttagtgtccttttctcatttgtggctttctgcatcacccaatcaataaaaaacaaatatatatatgt

SEQ ID NO: 2 - DNA, 4134 bp, Unknown
  Zinc finger protein 198
  exon (1)..(4134)
atggacacaagttcagtgggaggattagaattgactgatcagactcctgttttattagggagtacggccatggcaactagtctcacgaatgtaggaaactcatttagtggtccagctaatcctttagtgtctagatctaataagtttcagaactcgtcagtggaagatgatgatgatgttgtttttatcgaacctgtacaacctcccccaccttctgtaccagtggtagctgatcaaagaaccataacatttacatcatcaaaaaatgaagaactacaaggaaatgattccaaaattactccttcctcaaaagagttggcatctcagaagggaagtgtaagtgagacaattgtcattgatgatgaagaggacatggaaacaaatcaagggcaagagaaaaattcctccaattttattgaacgaagacctcctgagactaaaaacagaaccaatgatgtggatttctccacttccagtttttcaagaagtaaggtaaatgcaggaatgggtaatagtggtatcaccacagaaccagactctgaaattcagattgctaatgttacaactttagaaacaggtgtaagctctgtgaatgatggccaattagaaaatactgacgggcgagatatgaacttaatgattacacatgtaacatcactgcagaataccaacttgggagatgtctctaacggactgcagtcaagtaattttggtgttaatatacaaacatacaccccatctttaacttcacagaccaagactggagtaggaccttttaatcctggtagaatgaatgtggcaggagacgtttttcagaatggagaatctgcaactcatcataatcctgattcttggatctcccagtcagcttcatttccccgtaatcagaaacaaccaggggtggactctttatcaccagtggcctcacttcctaaacagattttccagccgtctgtccaacagcagcctactaaaccagttaaagtcacttgtgcaaactgcaaaaaacctttacagaagggccagacagcttatcaacgaaaaggatcagctcacctcttttgttctaccacctgcctttcttccttctcccacaagcctgctccaaagaaactctgtgttatgtgtaaaaaagatataactacaatgaaaggaaccattgttgctcaagtggattcaagtgagtccttccaggaattctgtagtacatcttgtttatctctctatgaagacaaacagaatcctactaaaggagctctaaataaatcaagatgtacaatctgtggtaaactaactgagattcgccatgaagtcagctttaaaaatatgactcataagctgtgcagtgaccactgctttaatagatatagaatggccaatggtttaataatgaattgctgtgaacagtgtggagagtacttgcccagtaaaggtgctggaaataatgttctggtgattgatggtcaacagaaaagattttgctgtcaaagttgtgtcagtgaatacaaacaggtaggtagccatccaagcttcctgaaggaggttcgagatcacatgcaggactctttcttaatgcagcctgagaaatatggaaaactgacaacttgtactggttgccgaacacagtgcaggttttttgatatgactcagtgtataggtcctaatggatatatggagccatattgttcaactgcttgtatgaacagtcacaagacaaaatatgcaaaatcacaaagtttgggaattatttgccatttttgtaagcgaaactctttacctcaataccaagccacaatgcctgatggaaaactgtacaacttttgcaattccagttgtgtggctaaatttcaggctctaagtatgcagtcatctccaaatggccagtttgtagcgccaagtgatattcagttgaaatgcaactactgcaaaaattccttttgttcaaaaccagaaatcctggaatgggagaacaaagtgcatcagttctgcagcaaaacttgttcagatgactataagaagttgcattgcatagttacatattgcgaatactgtcaagaggagaagactcttcatgaaacagtaaatttctctggcgttaagagacctttctgtagtgaaggctgcaaattattatacaaacaggattttgccagacgtttaggattgagatgtgttacttgcaactattgttctcagctatgtaagaagggagcaactaaagaactcgatggtgttgtgagagatttctgcagtgaagattgctgtaaaaaatttcaggattggtactacaaggctgcaaggtgtgactgttgtaaatctcaaggaactcttaaagagcgagttcagtggcgtggggaaatgaaacatttctgtgatcaacattgcttactgcgtttctactgtcaacaaaatgagcccaacatgacaactcagaaaggacctgaaaacttacattatgatcagggttgtcagacatctcgaaccaaaatgacaggttcagcaccacccccttctccaacacctaacaaagagatgaagaacaaagcagttctttgcaaacctttaacaatgacaaaagctacttactgtaaacctcacatgcagaccaaatcttgtcagacagatgatacttggaggacagaatatgttccagtgcctatccctgtgcctgtgtatatcccagttcctatgcacatgtacagtcagaatattcctgttcctactacagttcctgttcctgtgccagttcctgtttttctgcctgctccattggacagcagtgagaagattcctgcagcaattgaggagctaaaaagcaaggtttcttcagatgctcttgatacagagttgcttacaatgacggatatgatgagtgaagacgaggggaaaacagagacaaccaacatcaacagtgtaattattgaaacagatataattggttcagaccttttgaagaactctgacccagagacacagtccagcatgcctgatgtaccatatgaaccagatttggatatcgaaatagattttcccagagctgctgaggagcttgatatggaaaatgaatttttattaccacctgtttttggcgaagaatatgaggaacagcccagacctcgatctaaaaaaaagggagccaagagaaaggctgtatcaggataccagtctcatgatgatagttctgacaattcagaatgcagctttcctttcaaatatacgtatggcgtaaatgcatggaaacactgggtcaaaactaggcaacttgatgaagatcttctggtattagatgagttaaaatcttctaaatcagtaaagttaaaagaggatctactctctcacaccacagctgagcttaactatgggttagctcattttgtcaatgagatccgacggccaaatggagagaattatgcacctgacagcatctattacctttgccttggaatacaggagtatttgtgtggaagtaatcgaaaagacaacatatttattgatcctggataccaaacatttgagcaagaattgaataaaatactgcgaagctggcaaccaagcatacttccagatgggtcaatattctctcgagttgaagaagactatctctggaggataaaacaactaggatcacactctccagtagctcttctgaatacactgttctactttaacactaagtattttggcctgaaaacagtggaacaacacttaagactttcctttggcactgtgtttaggcattggaaaaaaaatcctttaacgatggaaaacaaagcgtgtcttcgataccaagtgtcttccttgtgtggaacagataatgaagataaaattactactggaaaaagaaaacatgaagatgatgagccagtatttgaacaaattgaaaacacagccaatccttccagatgtcctgtgaaaatgtttgaatgctacttgtctaaaagtccacagaatcttaatcagaggatggatgttttttatttgcaaccagaatgctctagttctacagatagccctgtctggtatacgtctacttcactggaccgaaacaccttggaaaatatgcttgtacgggttcttctagtaaaagatatttatgataaagacaattatgaactggatgaagacacagactaa

SEQ ID NO: 3 - DNA, 923 bp, Homo sapiens
tctgcctttgtttcatctagcttgaactgtgagtgtttgggtcggccgatcacattgatcaggcactaaagccaaatgctttgtagtttgatatgtatgtatcccttaaaaatcatggagtgtgatctttccattttaatttagggtacatttctgccttctcttagtttgtcatatgaccagaacaagagaagccttaacctgtatttgctccaattctaaatcctcattttttttttgtttttattttatatatttatacctttgacaaagagaccagtgcccacatcccaccacaactctgaatctatcaggactgttgaagcagtaaatcctcagtgcaaacttttgccaaataataagtatcaacaaaataatctcttcgtaatgaaaggttcagagaattagtaaatctaatatatacttccataaaagtttattgtaattaataggtttttacttcttccaaatgattactttcaatatgatcttcagggagaaaaaaacttaaatggttttcatgagggtgataagtcacaatgtcatcatgtgcatgacctcctcgagaatctctcccaggctggaaatgtggcagtaatcatgggagttttcaagaagaaacctactttttataaagtgttgtctcccctacaaaaagatggggagaaagtttccttgtatatttaaaacaatgattattctaatatattttgtttctaaaaatgtgatattaaagtagatatatccctttagcattaccttaaaggctagaacaaaggggtaaatcttcagaaaagtgtcacagtacattttcaagtttagacttgaatcccagttcatctttacctttcgttgtgcttttttaacgcttctttatttttgatacacagactgcagtcgtacttgattttttaaaaattaaa

SEQ ID NO: 4 - DNA, 544 bp, Homo sapiens
gattattctaatatattttgtttctaaaaatgtgatattaaagtagatatatccctttagcattaccttaaaggctagaacaaaggggtaaatcttcagaaaagtgtcacagtacattttcaagtttagacttgaatcccagttcatctttagctttcgttgtgcttttttaacgcttctttatttttgatacacagactgcagtcgtacttgattttttaaaaattaaaacatgagcttatcagcaaaagacaaaaacagaactgcacagtcctaataatcaaatagcaattatactgcacaattcagtgattgtaaagtatcctgtaacaagcaatgtttgtttcctattttttgatacctcttaaacttatgtcttttagaaagacagtgcctctgtatgctttttgtatttttactgagtgtaaatatttgttatatttttggttaagagaatgtaaaagtaccattattattagcatatctactaatacattggtggaatcaataaagaatctacaataaaaaaaaaaaaaaaaaaaaa

SEQ ID NO: 5 - DNA, 4506 bp, Unknown
  CGG triplet repeat binding protein 1
gcaggcggacggggcgcggcgggggacacggcggccgccgcggggctcgatcgggcaacggcggcgacggcggcagcgacggatcctcctcctcccttattcccttgctcctctttcttccttttcttttcctttccggccgggcctcgtccactttccctaacggcggcctcgatcctacgtaaaggcatgacttcctggcaccacagggaaaatcgggtgcaagcccagaaactatttccccaccaccacttgttgaaaaactgatttgaaggcatctccggggttgaacaaacggaaagtgccaggatttgatgcgtctctggtttcgctctggagaccattccctgctaagtatcaagacgaaaaaaactggaaactaatccgaaccatatttatttagagtcagaatggagcgatttgtagtaacagcaccacctgctcgaaaccgttctaagactgctttgtatgtgactcccctggatcgagtcactgagtttggaggtgagctgcatgaagatggaggaaaactcttctgcacttcttgcaatgtggttctgaatcatgttcgcaagtctgccattagtgaccacctcaagtcaaagactcataccaagaggaaggcagaatttgaagagcagaatgtgagaaagaagcagaggcccctaactgcatctcttcagtgcaacagtactgcgcaaacagagaaagtcagtgttatccaggactttgtgaaaatgtgcctggaagccaacatcccacttgagaaggctgatcacccagcagtccgtgctttcctatctcgccatgtgaagaatggaggctccatacctaagtcagaccagctacggagggcatatcttcctgatggatatgagaatgagaatcaactcctcaactcacaagattgttgactaggaggttaccaccattgtgatcaagataaatgtggagtattaaagttatgtgttgattgtgtggttcatttttgtatttatttcatttaaaatcatgtgacgcagaatagttttgcaatgtgtatatagttgcaggcaaaaaaaaaaccacctcactgcaaaacttattgttaattttagtcaccaatggtataaagcaaaacctaggtttagagtgtgctaggatacctgaaacctgatggttatctttaaaattaatggtttttctcctgaaatgtttgtgcatggaagaactgccctgcttttttaccctgttgccatgtatgattattccttgtgagattacttaattacttggattgaagactagcctattgaagctgctgccaggcaacaccacttaacagtaacttaaaggaattattttctttagaggatcctcttcaaaaaggaagggagatagtggaaaactgttcttatatcttcagatccctagcagaaatgactgtttatttcaaactatgttttacttgtatatgatgtagtcaccttaactatctttcaattccatacttcccccgcccccattttaaaggcttattgttgtattttgtagcagcttcaagtgaccaaaagactaaaatctttcaacgtcaatgccaaaagccaaggggaattttgcagtgacaggattttagtctcttactatgaatactaatttcgaaccatagctttcattttaagcatcatcttgaatttctaaacttttttctatgtcttggtgttaaaagatttcaagattggcatttttacttaaacagacattttatggttgagttttctctttattatagagaattagtaatttttttttggctgacagatcagataaaattactttctattcattaatttttctctacaactttatgagtttatttaggtgaatagtctagactagaaacaagtttactttatctgctttgcctctggtggtacaaggtttttaacatggatggtaaacaattgtctagaaattctggcaggttttttgtattggagatctggcagtatcctgcataactttgggtgaggaaattgttctcttaaagatcagccatgttcaggaaatgatctctgtttgaacctcactatcctgtaaggttatccaagtagcttagcccagctaagttctatcagagacccaaattatattttttaaaaatttaacagctggaaacttggactagagctttaataaaaaatcttaaattctttgaaattcaagttaaaaatacttatatatttctattacaaagcagtgacaaatgatgccctgtgtgacttggagttatctttgacttttaccacaaatcttcatttataaaagaaaaagccaaagtgaaaaaaagttagattgtgtatttttcagtaacagctttccatgtcttaagatttttttacagacttaagtttctaattcaggttgtcaaactggccatttgacttcagagatttgttttcattaaaaaataagcctgccgccaaaataaatcacttatcaaaatgtgaactgttttcctcatgttcagttatgttaaagtagtatgataaatgcatgcctagagtagtgctctcgttgatgaagcacatgtatgaggagaccagcagcaaaacataaccatatgtgttttgcgtttacttcctctagaaaagaatttgcaggcaaccatgtttaatttgaactatctaagatggtagattttagaagctaggaataattgagttttatagcactattttcagaatacgaaaagatacacaatcattctgttttttgaaattccatgtgattcaaactgctccctattatttgggtattaatttgcactaatagcaaaatgtaatggcagatcagctttgagagtggtcctaagcagtaaactggatgatgttgcattagaaaaacatcaataattcatatttaagttttagtagttactactgatttgataatcacttaaattttatatatcttaatgtattttttcagactcctaattaattcccacattcactgtaactaggggcatagtccattctgttaggattatatcctctccttagaaatgttttccatcctgttgtggggatttggtattaatgtttcttcattgattatggaacttttgttccctgaagctagttaactgtgtctaaagttaaataaatacagcagaatgattgttttagcctgctcgaactgatacaaatccctgaaaccatgattggcatatgttagataacaaatgaggatgtctaagaggcatatgctgctttggaggtgtagtgaacgtgtgtacagaagttttcaatcttaactatatagtgttagtgtgatgctatactattggaaaaatagcagcttttttctattttataagttgtatgcataaacataagatttgtaatgtttcatttataaactgccttcttcaacacatgttaatagtgttttctcaaagtattgatagtatgtcttccagaatttcacaatatgcttacagtaaatatttcctagcttgttgaaatgttcaattctttgttggctttcttcttgattctgtgggggtgtataacaagcctgaaggacattgtaatcatttcttacaaggtgaaaattaagaaagattgtgtatgagagcctatatagttgttttatccattatcatctttgattaagactttaaaaaaatgctatttccagttaatgcatttggccctattgaattttcagggaccagaaaacattaaaaagttctgcatcttataatggtaaccaattaagcttgagattgttctgaaagtatcaattgctttaaaactgttgtaagtacagttggcaagatctccaagctgaaacttccacgttaaaacttttgcctgtaagaatttgcacatgaatgttaatggaaaacacaaaacttaagatggcccaaaacaaaagccacaaacagttcatcatttggtgcttagtctttgtaagggctctctgtggtttgacttaccccagctaccgttaaatgaggacaaatcaccttaaaacatgttcatttgattcataacaaggaaaattgggtctatgattttttgccaatcttagcctaaaagaaattgctttagcttctggtcagcactgattaaaatgtgaatagtgaagtggctatcctaaactggtttatctccacccacactatcatagatttcttaggtaaatacaattcttatctagtggtattctacttgtattcagaatactgtattaaaattttactatttcatttttgtattctgtgcttattttttttgctcacgcatgtatgcttagtataaatgtgtcacttctaaagttttgtctctgacttttagaaataaatttcagaaaaattgtttcaaaagattttgaaagcacattttgttttgtgagtcaatgacaaatatatttcctgattacaaaacaaaaaaaaaaaaaaaaaaaaaaaaaaaaaaaaaaaaaaaaaaaaaaaaaaaaaaaaaaaaaaaaaaaaaa

SEQ ID NO: 6 - DNA, 504 bp, Unknown
  CGG triplet repeat binding protein 1 (CGGBP1)
  exon (1)..(504)
atggagcgatttgtagtaacagcaccacctgctcgaaaccgttctaagactgctttgtatgtgactcccctggatcgagtcactgagtttggaggtgagctgcatgaagatggaggaaaactcttctgcacttcttgcaatgtggttctgaatcatgttcgcaagtctgccattagtgaccacctcaagtcaaagactcataccaagaggaaggcagaatttgaagagcagaatgtgagaaagaagcagaggcccctaactgcatctcttcagtgcaacagtactgcgcaaacagagaaagtcagtgttatccaggactttgtgaaaatgtgcctggaagccaacatcccacttgagaaggctgatcacccagcagtccgtgctttcctatctcgccatgtgaagaatggaggctccatacctaagtcagaccagctacggagggcatatcttcctgatggatatgagaatgagaatcaactcctcaactcacaagattgttga

SEQ ID NO: 7 - DNA, 3263 bp, Unknown
  Mst3 and SOK1-related kinase
ggcatcactcgagcccaggtcccagtcatcaccactcacagcgctcggcgttcaggaagaggagcaccagcggagcgcggctgcttcagcggcgggcgggcgccagaaaggccccgatcgaaaagcctgggagggccgccgaactacccccggagggaggagccagtccgaacccaaggcgccaccgccgcagaagcggagcgaggcagcattcgcctccatggcccactcgccggtggctgtccaagtgcctgggatgcagaataacatagctgatccagaagaactgttcacaaaattagagcgcattgggaaaggctcatttggggaagttttcaaaggaattgataaccgtacccagcaagtcgttgctattaaaatcatagaccttgaggaagccgaagatgaaatagaagacattcagcaagaaataactgtcttgagtcaatgtgacagctcatatgtaacaaaatactatgggtcatatttaaaggggtctaaattatggataataatggaatacctgggcggtggttcagcactggatcttcttcgagctggtccatttgatgagttccagattgctaccatgctaaaggaaattttaaaaggtctggactatctgcattcagaaaagaaaattcaccgagacataaaagctgccaatgtcttgctctcagaacaaggagatgttaaacttgctgattttggagttgctggtcagctgacagatacacagattaaaagaaatacctttgtgggaactccattttggatggctcctgaagttattcaacagtcagcttatgactcaaaagctgacatttggtcattgggaattactgctattgaactagccaagggagagccacctaactccgatatgcatccaatgagagttctgtttcttattcccaaaaacaatcctccaactcttgttggagactttactaagtcttttaaggagtttattgatgcttgcctgaacaaagatccatcatttcgtcctacagcaaaagaacttctgaaacacaaattcattgtaaaaaattcaaagaagacttcttatctgactgaactgatagatcgttttaagagatggaaggcagaaggacacagtgatgatgaatctgattccgagggctctgattcggaatctaccagcagggaaaacaatactcatcctgaatggagctttaccaccgtacgaaagaagcctgatccaaagaaagtacagaatggggcagagcaagatcttgtgcaaaccctgagttgtttgtctatgataatcacacctgcatttgctgaacttaaacagcaggacgagaataacgctagcaggaatcaggcgattgaagaactcgagaaaagtattgctgtggctgaagccgcctgtcccggcatcacagataaaatggtgaagaaactaattgaaaaatttcaaaagtgttcagcagacgaatccccctaagaaacttattattggcttctgtttcatatggacccagagagccccaccaaacctacgtcaagattaacaatgcttaacccatgagctccatgtgccttttggatctttgcaacactgaagatttggaagaagctattaaactattttgtgatggcgtttatcattttatattttgaaaggattattttgtaaggaataacttttaatactatagtttcacctgtattctagtaaatgttgagacaccgttttgcttttaagtatccctatttcttaagttacgaggatgaatacctttcacattttgatctttagttgactctacagtcatgaaacatacaggtctttcaaagtcattctcaatattcagcttttgtaaattatcaagcttcaaaaagctttttttttaaaaaaaaaaacatgcatattctaaaaatgactattggtggggaggtgtaaataagtcataccttcttaaaacagaaaatttaagtaaagtcttttaaatgaaacctgtaaaagtattgactcttctaccaagttggtatgatattccaggcagctcaatgattatcacatttgagaccctgtgtttgaagcatttacaggcaatgtacagcaacagaggtacctcttggtgtatagtatttacattctcttttaggtagaagaggcaattttacccttatttcacatggttagaaatttaaagcaagatcatttacccaaggataggtgtttggtaatgttgaaggagttagtctggcttcatgttttacatcttcaactaaaatcccatactatctgcttggatttggagagccaaaaaataaagctgattgtcatgtgattaaatatctgatcaacaggtatgaatataacttaaatcagcatatttttgccatggtaataaattgtcctataaactatttatatatttttgttcttcataattatcactaataagcatcagtttgttgtttttaaaaggatatttaagtgagcattttctagttcatatgaaaataaccatagtacaggatgatttctgtccacacaaaggttaaattagattgcacagttaattttcacttatatttatggtactattatgtgggtgatgcctttttcttttaagcccagtacatatattatgcctgcctaagttctgaactggggctgtatttcagtagttgtagaattattgatatttagttttgatagctaatgtttaattgtttggatctgcacagtttggtttttgcacaaaagtcatttaaaaaaatctgagtaattgtcaaatattaaaagaaagatattcttcctgtaaggaatacagtttttagtcaaagtggccattacatcctctttttaatttacataatacagatacttgagaaagttgttgtggtgttgtatgccaagaaaattctttttattggtgcctatattgtaacaattatttttaatgcattgtattttgaagtaacggttcagttaaatttttcacctgctgtgtaactgaagcacaattacagtttataatcatctgtagaagtctggagataattttgcaactcatgttatgggttaaatgaatatttttgtaaaagtaaaagcaacaaatttataaattgattatttgaaactttacaacacaattgcatcccaaatacaaattgtattgcttattcattatagctattcgtcctgtaatctgtttctaggtgaagcatactccagtgttttaggggttttgaaaataaatatttaaatttcacagtcaaaaaaa

SEQ ID NO: 8 - DNA, 1251 bp, Unknown
  Mst3 and SOK1-related kinase (MASK)
  exon (1)..(1251)
atggcccactcgccggtggctgtccaagtgcctgggatgcagaataacatagctgatccagaagaactgttcacaaaattagagcgcattgggaaaggctcatttggggaagttttcaaaggaattgataaccgtacccagcaagtcgttgctattaaaatcatagaccttgaggaagccgaagatgaaatagaagacattcagcaagaaataactgtcttgagtcaatgtgacagctcatatgtaacaaaatactatgggtcatatttaaaggggtctaaattatggataataatggaatacctgggcggtggttcagcactggatcttcttcgagctggtccatttgatgagttccagattgctaccatgctaaaggaaattttaaaaggtctggactatctgcattcagaaaagaaaattcaccgagacataaaagctgccaatgtcttgctctcagaacaaggagatgttaaacttgctgattttggagttgctggtcagctgacagatacacagattaaaagaaatacctttgtgggaactccattttggatggctcctgaagttattcaacagtcagcttatgactcaaaagctgacatttggtcattgggaattactgctattgaactagccaagggagagccacctaactccgatatgcatccaatgagagttctgtttcttattcccaaaaacaatcctccaactcttgttggagactttactaagtcttttaaggagtttattgatgcttgcctgaacaaagatccatcatttcgtcctacagcaaaagaacttctgaaacacaaattcattgtaaaaaattcaaagaagacttcttatctgactgaactgatagatcgttttaagagatggaaggcagaaggacacagtgatgatgaatctgattccgagggctctgattcggaatctaccagcagggaaaacaatactcatcctgaatggagctttaccaccgtacgaaagaagcctgatccaaagaaagtacagaatggggcagagcaagatcttgtgcaaaccctgagttgtttgtctatgataatcacacctgcatttgctgaacttaaacagcaggacgagaataacgctagcaggaatcaggcgattgaagaactcgagaaaagtattgctgtggctgaagccgcctgtcccggcatcacagataaaatggtgaagaaactaattgaaaaatttcaaaagtgttcagcagacgaatccccctaa

SEQ ID NO: 9 - DNA, 1925 bp, Homo sapiens
tctgtcttagggctggtgctggccctgcccacgcctagggctccggcgcgtcacgggcctcagctgggattcccgcgcccctcggacggccacgagactcggacatctttccaggaacagcgtgaggaggacagaagcacccaacaggactgctcaagccacctgcgaacactgctgctaccatgcccaagagaaaggcaaaaggagatgctaaaggtgataaagcaaaggtgaaggatgagccacagaggagatcagctcggttgtctgctaaaccagctcctccaaaaccagagcccaggcctaaaaagagcccctgcaaagaagggagagaagctacccaaagggagaaaggggaaagcagaatagtggcaaggatgggaacaaccctgcgaaaaaccgagatgccaccacagtccagtcacagaaagcggaaggcagcggggatgccaagtgaagtgtgctattttgatagctctgtacttgtagtgactctgctgtttgaaatactatttttttaaatcaagttttataaaagtgtagaattttggcttttttaagttatattgttagcacacaggacactttgttgtcttttgtggaaagggcaaataccactaacagagtgtttcagaagctggattaaaatggaggaaaatagtattttctgtcctcatttttgaagattattcttgattcccttgattcccaggagagattctctgacattcacacacgagtcagtcactttggctcagacgccttacagtgtgtggaagcaaaacttcatgtctcctctttccccgatgccatcagcatagacttgacttccttaaaccgagagttttgatgtggccttggcaaccctaaaatcagctgtgttgggtaataatcctcaggccttctgatgaagacatcgacatggtgttgctcaaaagagccaagattcctgtttgcaatttgtggattcatcctgctggttttactttagtccctccatgtcaaagtgggcctgtgaaaagctcttacatgcctcatgtgaaatatccaccctctctgaaaatctttcttgttcaaaacagcaacgacatatcttgttaacttttacggtgacttttggaggaggggagtttggaaattgtaaaatgttatagattgttgcctatttcctgctgaaagtaaatgtttttaaaaagtatcatataaagctgaatacaaattggtttggggggagatcctttcctacccaaagtcataaatatattctttactgccttgtggaaattttatagttttgcctttcacatttgtctttagtctgtcctgaactgatttttgtgaaaattatgagttagaaattcaacttaacatttttcatattcgaagtggttgttgcagcaccattttctgaaaagttcatcctttcctcactgacctgtaacactgtctctttcataaatcaagtttgtgtgtttgtgtgggtctcttgatggtttctgttctgactcactggtcaatttgtctaacctgtggcagtactatacaatcctgagtatgacaactttagaaaaaggtctgataaaaaccaagatgcctccacattttgtcataattgtaaccaatttcacctctgtctccagtatcatcaccaaatttttcttccttgagagtatcttggctatttttagccactgttcctccatattacttctagaattagaccaacaatttataaatcaaacaaacccaagagcattgaaattttgattggatttgtattgaatttatagattaatctggtaaaccatgtcatctttacaatgttgtcttccaatacatgaatatggtacagctcttcatttatttaggctttttaaatgtctttcaataaagttttataattttctccaaaaaaaaaaaaaaaa

SEQ ID NO: 10 - DNA, 339 bp, Homo sapiens
  exon (1)..(339)
atgcccaagagaaaggcaaaaggagatgctaaaggtgataaagcaaaggtgaaggatgagccacagaggagatcagctcggttgtctgctaaaccagctcctccaaaaccagagcccaggcctaaaaagagcccctgcaaagaagggagagaagctacccaaagggagaaaggggaaagcagaatagtggcaaggatgggaacaaccctgcgaaaaaccgagatgccaccacagtccagtcacagaaagcggaaggcagcggggatgccaagtgaagtgtgctattttgatagctctgtacttgtagtgactctgctgtttgaaatactatttttttaa

SEQ ID NO: 11 - DNA, 2728 bp, Yeast
atcttggcttcccggggaaaggcggcgtgaggggaagaagttgtagggtgggggcaggagtgaggaggagggaagagagagggggaggaggccgcggcggggcagggcggggactgcctgcctgcctgggttgcggaagtgatagccgccgaccgagcctgctgctttcttgctactgcttcggcttcccggctaccccccggacggtgaaggcggcccagctgtggatggtcagatagcccttgtttcccgccgccaatctctggcccatagcagcacggagcagacggcggcagcagcagcagcaggcgaggaggaagatggcgggacggctgccggcctgtgtggtggactgtggcacggggtatacaaaactaggatatgctggaaatacagaaccacagtttatcatcccttcctgtattgctattaaggagtcagcaaaagtgggtgatcaagctcaaaggagggtgatgaaaggtgttgatgacctagacttcttcattggtgatgaagcaatagaaaaacctacatatgcaacaaagtggccaatccgccatggtatagttgaagattgggacttaatggaaaggtttatggagcaagtgatctttaaatatttaagggcagaacctgaagaccattattttcttttgactgaacctccattgaatactccagaaaacagggaatatactgctgaaataatgtttgagtccttcaatgttccaggcttgtacattgctgtgcaggctgttcttgccttagctgcatcttggacctcaagacaagtaggagaacggacgttgaccggtacggtaatagacagtggagatggtgtcactcatgtcattcctgtggctgaagggtatgtgattggcagctgtattaaacacattccaatcgcaggacgagatataacatattttattcagcaactgctgagagaccgagaagtaggaatccctccagaacaatccttggaaactgctaaggcagtaaaggagcgctatagttatgtctgcccagatttagtaaaagaatttaacaagtatgatacagatgggtcaaaatggattaaacagtatactggaatcaatgctatctcaaagaaagagttttctatcgatgttggttatgagagatttttgggacctgaaatcttttttcatccagagtttgctaatccagactttacacaacctatctcagaagttgtagatgaagtaattcagaattgtcctattgatgtcagacgtcctctctacaagaatattgtcctctctggaggttcaaccatgttcagggactttggacgtcgcttgcaaagagatttgaaaagaactgtagatgcccggctgaaattaagtgaggaattgagtggtggtagattgaagccaaaacctattgatgtacaagtcattacacaccacatgcagcgatatgcagtttggtttggaggatcaatgctggcttccacgcctgagttctaccaagtatgccacaccaaaaaggattatgaagaaattggacctagcatttgtcgtcacaatccagtgtttggagtcatgtcgtaaaattggcttcatagttattggggttagggaggtggggaagagataatctttctgattacctgttttgtctggatggctggttttgaggttttaaacctgacttgaaatagtaacaccaaacatgattatacaggaatattttaataagtgtatcaccatgcagatgtagaagagagcgaaagtgattgtgtttttctttagattgaatatttgaatcttatgtgtaacaaaaagaagtgggttttagttctttctgtgccctgatattttgtatattaatgaattatccaagattcgatgggatttatcagtgtgtagatagctctataatgcttgaattgtacacttctaagtgtgcagtgcaagagcttgtttatatttcatactttttatactttgaggaaaaaaagtcaaagaaaaattgtatttgagggaaaaaaccatgaccaagtaaaggataaattcaaaaaatagcctcatgagacttggcatacacactcgtgggattccagttattatggagtgcttccatccctctccaccccttccccccaaaaggttttctttgcaagtgcttttggaactaagagctagtatcttggattaactgatgcctgctagtgctttctgattactcgcattctgtttcttgctttaaaagaagagtaaagacaagagtgttggaccagtattgcagttctgtagtgtcatttcttataaaaaacaaaacaacaacaataatttatcaaaattggcatatttaaagcctaacattctaataaaggcacaaatttctttttaatacttgtttcagcctctttaatctctttataagttaactaataaatctattttcttcagacttctgcaatagttctttaaaatcacaacagttagcaagctgacttttgtaatgtgctcaatacaaatacttgtgaacttttaatatgttgagtgctttcattttgataactggatctccatttgatattttcatttgtataactcatttgcagtctgaaaattttttttagtgccagtccctgaacatatcattgaaagttaattttctttgcattttaaaatatctggattatgaagaaaaagtgatgaaaataaattaaaactgaattacaaaaaaaaaaaaaaaa

SEQ ID NO: 12 - DNA, 1257 bp, Yeast
  exon (1)..(1257)
atggcgggacggctgccggcctgtgtggtggactgtggcacggggtatacaaaactaggatatgctggaaatacagaaccacagtttatcatcccttcctgtattgctattaaggagtcagcaaaagtgggtgatcaagctcaaaggagggtgatgaaaggtgttgatgacctagacttcttcattggtgatgaagcaatagaaaaacctacatatgcaacaaagtggccaatccgccatggtatagttgaagattgggacttaatggaaaggtttatggagcaagtgatctttaaatatttaagggcagaacctgaagaccattattttcttttgactgaacctccattgaatactccagaaaacagggaatatactgctgaaataatgtttgagtccttcaatgttccaggcttgtacattgctgtgcaggctgttcttgccttagctgcatcttggacctcaagacaagtaggagaacggacgttgaccggtacggtaatagacagtggagatggtgtcactcatgtcattcctgtggctgaagggtatgtgattggcagctgtattaaacacattccaatcgcaggacgagatataacatattttattcagcaactgctgagagaccgagaagtaggaatccctccagaacaatccttggaaactgctaaggcagtaaaggagcgctatagttatgtctgcccagatttagtaaaagaatttaacaagtatgatacagatgggtcaaaatggattaaacagtatactggaatcaatgctatctcaaagaaagagttttctatcgatgttggttatgagagatttttgggacctgaaatcttttttcatccagagtttgctaatccagactttacacaacctatctcagaagttgtagatgaagtaattcagaattgtcctattgatgtcagacgtcctctctacaagaatattgtcctctctggaggttcaaccatgttcagggactttggacgtcgcttgcaaagagatttgaaaagaactgtagatgcccggctgaaattaagtgaggaattgagtggtggtagattgaagccaaaacctattgatgtacaagtcattacacaccacatgcagcgatatgcagtttggtttggaggatcaatgctggcttccacgcctgagttctaccaagtatgccacaccaaaaaggattatgaagaaattggacctagcatttgtcgtcacaatccagtgtttggagtcatgtcgtaa

SEQ ID NO: 13 - DNA, 2323 bp, Unknown
  Leu-8 pan leukocyte antigen
ctccctttgggcaaggacctgagacccttgtgctaagtcaagaggctcaatgggctgcagaagaactagagaaggaccaagcaaagccatgatatttccatggaaatgtcagagcacccagagggacttatggaacatcttcaagttgtgggggtggacaatgctctgttgtgatttcctggcacatcatggaaccgactgctggacttaccattattctgaaaaacccatgaactggcaaagggctagaagattctgccgagacaattacacagatttagttgccatacaaaacaaggcggaaattgagtatctggagaagactctgcctttcagtcgttcttactactggataggaatccggaagataggaggaatatggacgtgggtgggaaccaacaaatctctcactgaagaagcagagaactggggagatggtgagcccaacaacaagaagaacaaggaggactgcgtggagatctatatcaagagaaacaaagatgcaggcaaatggaacgatgacgcctgccacaaactaaaggcagccctctgttacacagcttcttgccagccctggtcatgcagtggccatggagaatgtgtagaaatcatcaataattacacctgcaactgtgatgtggggtactatgggccccagtgtcagtttgtgattcagtgtgagcctttggaggccccagagctgggtaccatggactgtactcactctttgggaaacttcagcttcagctcacagtgtgccttcagctgctctgaaggaacaaacttaactgggattgaagaaaccacctgtggaccatttggaaactggtcatctccagaaccaacctgtcaagtgattcagtgtgagcctctatcagcaccagatttggggatcatgaactgtagccatcccctggccagcttcagctttacctctgcatgtaccttcatctgctcagaaggaactgagttaattgggaagaagaaaaccatttgtgaatcatctggaatctggtcaaatcctagtccaatatgtcaaaaattggacaaaagtttctcaatgattaaggagggtgattataaccccctcttcattccagtggcagtcatggttactgcattctctgggttggcatttatcatttggctggcaaggagattaaaaaaaggcaagaaatccaagagaagtatgaatgacccatattaaatcgcccttggtgaaagaaaattcttggaatactaaaaatcatgagatcctttaaatccttccatgaaacgttttgtgtggtggcacctcctacgtcaaacatgaagtgtgtttccttcagtgcatctgggaagatttctacctgaccaacagttccttcagcttccatttcgcccctcatttatccctcaacccccagcccacaggtgtttatacagctcagctttttgtcttttctgaggagaaacaaataagaccataaagggaaaggattcatgtggaatataaagatggctgactttgctctttcttgactcttgttttcagtttcaattcagtgctgtacttgatgacagacacttctaaatgaagtgcaaatttgatacatatgtgaatatggactcagttttcttgcagatcaaatttcacgtcgtcttctgtatactgtggaggtacactcttatagaaagttcaaaaagtctacgctctcctttctttctaactccagtgaagtaatggggtcctgctcaagttgaaagagtcctatttgcactgtagcctcgccgtctgtgaattggaccatcctatttaactggcttcagcctccccaccttcttcagccacctctctttttcagttggctgacttccacacctagcatctcatgagtgccaagcaaaaggagagaagagagaaatagcctgcgctgttttttagtttgggggttttgctgtttccttttatgagacccattcctatttcttatagtcaatgtttcttttatcacgatattattagtaagaaaacatcactgaaatgctagctgcaagtgacatctctttgatgtcatatggaagagttaaaacaggtggagaaattccttgattcacaatgaaatgctctcctttcccctgcccccagaccttttatccgacttacctagattctacatattctttaaatttcatctcaggcctccctcaaccccaccacttcttttataactagtcctttactaatccaacccatgatgagctcctcttcctggcttcttactgaaaggttaccctgtaacatgcaattttgcatttgaataaagcctgctttttaagtgtt

SEQ ID NO: 14 - DNA, 1158 bp, Unknown
  Leu-8 pan leukocyte antigen
  exon (1)..(1158)
atgggctgcagaagaactagagaaggaccaagcaaagccatgatatttccatggaaatgtcagagcacccagagggacttatggaacatcttcaagttgtgggggtggacaatgctctgttgtgatttcctggcacatcatggaaccgactgctggacttaccattattctgaaaaacccatgaactggcaaagggctagaagattctgccgagacaattacacagatttagttgccatacaaaacaaggcggaaattgagtatctggagaagactctgcctttcagtcgttcttactactggataggaatccggaagataggaggaatatggacgtgggtgggaaccaacaaatctctcactgaagaagcagagaactggggagatggtgagcccaacaacaagaagaacaaggaggactgcgtggagatctatatcaagagaaacaaagatgcaggcaaatggaacgatgacgcctgccacaaactaaaggcagccctctgttacacagcttcttgccagccctggtcatgcagtggccatggagaatgtgtagaaatcatcaataattacacctgcaactgtgatgtggggtactatgggccccagtgtcagtttgtgattcagtgtgagcctttggaggccccagagctgggtaccatggactgtactcactctttgggaaacttcagcttcagctcacagtgtgccttcagctgctctgaaggaacaaacttaactgggattgaagaaaccacctgtggaccatttggaaactggtcatctccagaaccaacctgtcaagtgattcagtgtgagcctctatcagcaccagatttggggatcatgaactgtagccatcccctggccagcttcagctttacctctgcatgtaccttcatctgctcagaaggaactgagttaattgggaagaagaaaaccatttgtgaatcatctggaatctggtcaaatcctagtccaatatgtcaaaaattggacaaaagtttctcaatgattaaggagggtgattataaccccctcttcattccagtggcagtcatggttactgcattctctgggttggcatttatcatttggctggcaaggagattaaaaaaaggcaagaaatccaagagaagtatgaatgacccatattaa

SEQ ID NO: 15 - DNA, 785 bp, Unknown
  No Homology
gatgcctgcaatacctcttatcatcgttgtaacatttcttccaaaattaatgacccaacccgtcctctctgggccagagttaaagcgaggcttggacaagaagaatcggcctatgcagactcaaaagagtttatcctgtgccagcacgggaaaattggaccacctaaactggatatcagaaagaaagacgaccagatcattattgacatatctcaccctttatttgctgtaaatggatttgacctggaagccatgtatgatgatgaaaatgcttgttacgaattcgtgtacaaggtgtatgtgaaaataaacggaagtggagagagcatggagagagtgtatgaatgcagagacgaggactgcaatgagacccactgccgcctcggcatcccagcgtcctccctgaactctcagtgctgcgctgcagcagagggagtctcggaacgatgggagttcacaactgacaagtccgaagaactctgcctgaccgttttcgatgatggcagcccagaaggttcggtttggattccagttgttgctgctttcctactctttctagtcattctgctggttgcgtgttgttattgtcgcattaagacgaagaatctgtttaagagaagaaacaaccctttacccagttccttgctgtctgtggtaagaagtgcctcttcagagccagactctgaatcaaagcatatatcgcctgtcacctaccagccaattgtcccggagaacgatcacctgtcttcagcagcggtgtcagggacgcaggctgaagacagtcc

SEQ ID NO: 16 - DNA, 626 bp, Unknown
  No homology
gtggacgaaggtgggaaggagttccctgatcggctacagactgacagctgactcccaggagttctcctgagctcagccgaggggcccggccctgaaggaagggctctgcctgagcagttcttcctgaacggctttgagtttgtgaaaagatctgatttctggaattgtgtcaatattaaccacatgcaatgtctggttcagatcaaaatgtgaactgcctgttgaacttggtcgcatttggtctgaaaacagcaaaccagtttcaaaacctgtcttaggaaaacaagcgacatcagcacctgggagcctttctcccggcacggccagctgtgacagtggcactccctgccaccctcttcctgcgacagcggtggcatctgtggcggatgtttcttctctgcgcctccgtgtgggatttggtttggaagtttgtgtagatagtacttttaaatacctgcttttggaagaaatcctggaagcttttcaaaactggcatttaaaatcagatttgagccagtggaattaatagagggtgtaaatagagacgtgcatgtgtcttccaggagcattgcacgttgcctgtagaaagttttaaataaaacatttttaaaattaaaaaaaaaaaa

SEQ ID NO: 17 - DNA, 2066 bp, Unknown
  Glycerol kinase
ttgaactcctggagcccgtcacccaggaaaccggccgcaatcgccggccgacctgaagctggtttcatggcagcctcaaagaaggcagttttggggccattggtgggggcggtggaccagggcaccagttcgacgcgctttttggttttcaattcaaaaacagctgaactacttagtcatcatcaagtagaaataaaacaagagttcccaagagaaggatgggtggaacaggaccctaaggaaattctacattctgtctatgagtgtatagagaaaacatgtgagaaacttggacagctcaatattgatatttccaacataaaagctattggtgtcagcaaccagagggaaaccactgtagtctgggacaagataactggagagcctctctacaatgctgtggtgtggcttgatctaagaacccagtctaccgttgagagtcttagtaaaagaattccaggaaataataactttgtcaagtccaagacaggccttccacttagcacttacttcagtgcagtgaaacttcgttggctccttgacaatgtgagaaaagttcaaaaggccgttgaagaaaaacgagctctttttgggactattgattcatggcttatttggagtttgacaggaggagtcaatggaggtgtccactgtacagatgtaacaaatgcaagtaggactatgcttttcaacattcattctctggaatgggataaagagctctgcgaattttttgaaattccaatgaaagtccttccaaatgtccggagttcctctgagatctatggcctaatgaaagctggggccttggaaggtgtgccaatatctgggtgtttgggagaccagtctgctgcattggtgggacaaatgtgcttccaggatggacaagccaaaaacacgtatggaacaggctgtttcttactatgtaatacaggccgtaagtgtgtattttctgaacacggccttctgaccacagtggcttataaactcggcagagataaacccgtatattatgcattggaaggttctgtagctatagctggtgctgttattcgctggctaagagacaatctaggaattatacagacctcagaggaaattgaaaaacttgctaaagaagttggtacttcttatggctgctatttcgtcccagcattttcagggttatatgcgccttattgggagcccagtgcaagagggatcatctgtgggctcacacagttcaccaataaatgccatattgcttttgccgcattagaagctgtctgtttccaaacccgagagattttggatgccatgaaccgcgactgtgggattccactcagtcatttgcaggtagatggaggaatgaccaacaacaagattcttatgcagctccaagctgacattctgtacatcccagtagtgaagccctcgatgcctgaaacaacggctctgggagctgccatggctgcaggcgctgcagaaggcgtcggcgtctggagtctcgaacccgaggatttgtcagctgtcacaatggaacggtttgaaccccagatcaatgctgaggaaagtgaaattcgttattctacgtggaagaaagctgtgatgaagtcaatgggttgggttacaactcagtcttcggaaagtggtatcccgtaaataataccaactcatggattccaaagatgcgacctctttatctaatgagagaatccagtggttgtctctaaatgtgatgacactattcatagactctgattttatttataagccacttgctgcatgaccctccaagtagacccgtggcttgaaataaagaaaatgcagcagaaagaatgttatagaaatatttggtggtttttttttttttaaacatccacagttaaggttgggccagctacctttgggggtgaccccccccattgccataacatcctgctccattccctctaagatgtaggaagaattcggatccttaccattggaatcttccatcgaacatactcaaacacttttgggccaggatttgagtctctgcatgacatatacttgattaaaaggttattactaacctgttaaaaatc

SEQ ID NO: 18 - DNA, 1575 bp, Unknown
  Glycerol kinase (GK)
  exon (1)..(1575)
atggcagcctcaaagaaggcagttttggggccattggtgggggcggtggaccagggcaccagttcgacgcgctttttggttttcaattcaaaaacagctgaactacttagtcatcatcaagtagaaataaaacaagagttcccaagagaaggatgggtggaacaggaccctaaggaaattctacattctgtctatgagtgtatagagaaaacatgtgagaaacttggacagctcaatattgatatttccaacataaaagctattggtgtcagcaaccagagggaaaccactgtagtctgggacaagataactggagagcctctctacaatgctgtggtgtggcttgatctaagaacccagtctaccgttgagagtcttagtaaaagaattccaggaaataataactttgtcaagtccaagacaggccttccacttagcacttacttcagtgcagtgaaacttcgttggctccttgacaatgtgagaaaagttcaaaaggccgttgaagaaaaacgagctctttttgggactattgattcatggcttatttggagtttgacaggaggagtcaatggaggtgtccactgtacagatgtaacaaatgcaagtaggactatgcttttcaacattcattctctggaatgggataaagagctctgcgaattttttgaaattccaatgaaagtccttccaaatgtccggagttcctctgagatctatggcctaatgaaagctggggccttggaaggtgtgccaatatctgggtgtttgggagaccagtctgctgcattggtgggacaaatgtgcttccaggatggacaagccaaaaacacgtatggaacaggctgtttcttactatgtaatacaggccgtaagtgtgtattttctgaacacggccttctgaccacagtggcttataaactcggcagagataaacccgtatattatgcattggaaggttctgtagctatagctggtgctgttattcgctggctaagagacaatctaggaattatacagacctcagaggaaattgaaaaacttgctaaagaagttggtacttcttatggctgctatttcgtcccagcattttcagggttatatgcgccttattgggagcccagtgcaagagggatcatctgtgggctcacacagttcaccaataaatgccatattgcttttgccgcattagaagctgtctgtttccaaacccgagagattttggatgccatgaaccgcgactgtgggattccactcagtcatttgcaggtagatggaggaatgaccaacaacaagattcttatgcagctccaagctgacattctgtacatcccagtagtgaagccctcgatgcctgaaacaacggctctgggagctgccatggctgcaggcgctgcagaaggcgtcggcgtctggagtctcgaacccgaggatttgtcagctgtcacaatggaacggtttgaaccccagatcaatgctgaggaaagtgaaattcgttattctacgtggaagaaagctgtgatgaagtcaatgggttgggttacaactcagtcttcggaaagtggtatcccgtaa

SEQ ID NO: 19 - DNA, 3563 bp, Unknown
  DDHD domain containing 1
aacgcagctgcggcggctgcgggtctcgtgggggcggagcggtcgccgctgccgccgcagctcgggtcgggatttgaaagattagaaacttcgggtggagagggcggcggcgttgaatgtgtggcggaagcgctgggggtcacggctccgcgcgccgccggacagccggcggcgtctccacagcatgaattacccgggccgcgggtccccacggagccccgagcataacggccgaggcggcggcggcggcgcctgggagctgggctcagacgcgaggccagcgttcggcggcggcgtctgctgcttcgagcacctgcccggcggggacccggacgacggcgacgtgcccctggccctgctgcgcggggaacccgggctgcatttggcgccgggcaccgacgaccacaaccaccacctcgcgctggacccctgcctcagtgacgagaactatgacttcagctccgccgagtcgggctcctcgctgcgctactacagcgagggtgagagcggcggcggcggcagctccttgtcgctgcacccgccgcagcagcctccgctggtcccgacgaactcggggggcggcggcgcgacaggagggtcccccggggaaaggaaacgtacccggcttggcggcccggcggcccggcaccgctatgaggtagtgacggagctgggcccggaggaggtacgctggttctacaaggaggacaagaagacctggaagcccttcatcggctacgactcgctccgcatcgagctcgccttccggaccctgctgcagaccacgggtgcccggccccagggcggggaccgggacggcgaccatgtgtgctcccccacgggcccagcctccagttccggagaagatgacgatgaggaccgcgcctgcggcttctgccagagtacgacggggcacgagccggagatggtggagcttgtgaacatcgagcctgtgtgcgtgcggggcggcctctacgaggtggatgtgacccaaggagagtgctacccggtgtactggaaccaggctgataaaataccagtaatgcgtggacagtggtttattgacggcacttggcagcctctagaagaggaagaaagtaatttaattgagcaagaacatctcaattgttttaggggccagcagatgcaggaaaatttcgatattgaagtgtcaaaatccatagatggaaaagatgctgttcatagtttcaagttgagtcgaaaccatgtggactggcacagtgtggatgaagtatatctttatagtgatgcaacaacatctaaaattgcaagaacagttacccaaaaactgggattttctaaagcatcaagtagtggtaccagacttcatagaggttatgtagaagaagccacattagaagacaagccatcacagactacccatattgtatttgttgtgcatggcattgggcagaaaatggaccaaggaagaattatcaaaaatacagctatgatgagagaagctgcaagaaaaatagaagaaaggcatttttccaaccatgcaacacatgttgaatttctgcctgttgagtggcggtcaaaacttactcttgatggagacactgttgattccattactcctgacaaagtacgaggtttaagggatatgctgaacagcagtgcaatggacataatgtattatactagtccactttatagagatgaactagttaaaggccttcagcaagagctgaatcgattgtattcccttttctgttctcggaatccagactttgaagaaaaagggggtaaagtctcaatagtatcacattccttgggatgtgtaattacttatgacataatgactggctggaatccagttcggctgtatgaacagttgctgcaaaaggaagaagagttgcctgatgaacgatggatgagctatgaagaacgacatcttcttgatgaactctatataactaaacgacggctgaaggaaatagaagaacggcttcacggattgaaagcatcatctatgacacaaacacctgccttaaaatttaaggttgagaatttcttctgtatgggatccccattagcagttttcttggcgttgcgtggcatccgcccaggaaatactggaagtcaagaccatattttgcctagagagatttgtaaccggttactaaatatttttcatcctacagatccagtggcttatagattagaaccattaatactgaaacgctacagcaacatttcacctgtccagatccactggtacaatacttcaaatcctttaccttatgaacatatgaagccaagctttctcaacccagctaaagaacctacctcagtttcagagaatgaaggcatttcaaccataccaagccctgtgacctcaccagttttgtcccgccgacactatggagaatctataacaaatataggcaaagcaagcatattaggggctgctagcattggaaagggacttggaggaatgttgttctcaagatttggacgttcatctacaacacagtcatctgaaacatcaaaagactcaatggaagatgagaagaagccagttgcctcaccttctgctaccaccgtagggacacagacccttccacatagcagttctggcttcctcgattctgcattggagttggatcacaggattgattttgaactcagagaaggccttgtggagagccgctattggtcagctgtcacgtcgcatactgcctattggtcatccttggatgttgccctttttcttttaaccttcatgtataaacatgagcacgatgatgatgcaaaacccaatttagatccaatctgaactctcttgaaggacatgaatggcctaaaactgattttttttttttccgttaaaatgtgtgtgtcaagatacggagatttcagggttaaagtatatttcagttttctttagggcaacatatatttgaatttaaaagcactttatttaaaaaaaaaagaagttttcagttctgaagaagtcatttacagtttgcatcattttaattatgagtctgacaaaaccttctccagagaatcaagcaagacctggatgtgaagaaggtttgggtaaactgcatgtaaaggctacaaatcacaatctgattcctcccaaatataaaggcatatggaacataatgtattaaccaaagtatgttataaatcaaaaatggtcaaggttcagcatattctatatgaagatcacaaggtggtatcgttttagatttctatgaaggctttcatttgtacatccctttgaaaaaatataacagatttaaaatgttttgaatttaacttgtttagaaaaactaatgcttaaaacaatatttgaactactgtatttataatttattacctctaattgctttatttcagtgtatgagacattactgttttaatgtttgctttgaacataatttaagaaccagatttattttctatagtgataaacccttttttctcagaactccatctttgtactcttcagatgaatatatagacactgtggcatacattttttttcattaaaaacttatggcttcatacaaaaaaaaaaaaaaaaa

SEQ ID NO: 20 - DNA, 2619 bp, Unknown
  DDHD domain ontaining 1
  exon (1)..(2619)
atgaattacccgggccgcgggtccccacggagccccgagcataacggccgaggcggcggcggcggcgcctgggagctgggctcagacgcgaggccagcgttcggcggcggcgtctgctgcttcgagcacctgcccggcggggacccggacgacggcgacgtgcccctggccctgctgcgcggggaacccgggctgcatttggcgccgggcaccgacgaccacaaccaccacctcgcgctggacccctgcctcagtgacgagaactatgacttcagctccgccgagtcgggctcctcgctgcgctactacagcgagggtgagagcggcggcggcggcagctccttgtcgctgcacccgccgcagcagcctccgctggtcccgacgaactcggggggcggcggcgcgacaggagggtcccccggggaaaggaaacgtacccggcttggcggcccggcggcccggcaccgctatgaggtagtgacggagctgggcccggaggaggtacgctggttctacaaggaggacaagaagacctggaagcccttcatcggctacgactcgctccgcatcgagctcgccttccggaccctgctgcagaccacgggtgcccggccccagggcggggaccgggacggcgaccatgtgtgctcccccacgggcccagcctccagttccggagaagatgacgatgaggaccgcgcctgcggcttctgccagagtacgacggggcacgagccggagatggtggagcttgtgaacatcgagcctgtgtgcgtgcggggcggcctctacgaggtggatgtgacccaaggagagtgctacccggtgtactggaaccaggctgataaaataccagtaatgcgtggacagtggtttattgacggcacttggcagcctctagaagaggaagaaagtaatttaattgagcaagaacatctcaattgttttaggggccagcagatgcaggaaaatttcgatattgaagtgtcaaaatccatagatggaaaagatgctgttcatagtttcaagttgagtcgaaaccatgtggactggcacagtgtggatgaagtatatctttatagtgatgcaacaacatctaaaattgcaagaacagttacccaaaaactgggattttctaaagcatcaagtagtggtaccagacttcatagaggttatgtagaagaagccacattagaagacaagccatcacagactacccatattgtatttgttgtgcatggcattgggcagaaaatggaccaaggaagaattatcaaaaatacagctatgatgagagaagctgcaagaaaaatagaagaaaggcatttttccaaccatgcaacacatgttgaatttctgcctgttgagtggcggtcaaaacttactcttgatggagacactgttgattccattactcctgacaaagtacgaggtttaagggatatgctgaacagcagtgcaatggacataatgtattatactagtccactttatagagatgaactagttaaaggccttcagcaagagctgaatcgattgtattcccttttctgttctcggaatccagactttgaagaaaaagggggtaaagtctcaatagtatcacattccttgggatgtgtaattacttatgacataatgactggctggaatccagttcggctgtatgaacagttgctgcaaaaggaagaagagttgcctgatgaacgatggatgagctatgaagaacgacatcttcttgatgaactctatataactaaacgacggctgaaggaaatagaagaacggcttcacggattgaaagcatcatctatgacacaaacacctgccttaaaatttaaggttgagaatttcttctgtatgggatccccattagcagttttcttggcgttgcgtggcatccgcccaggaaatactggaagtcaagaccatattttgcctagagagatttgtaaccggttactaaatatttttcatcctacagatccagtggcttatagattagaaccattaatactgaaacgctacagcaacatttcacctgtccagatccactggtacaatacttcaaatcctttaccttatgaacatatgaagccaagctttctcaacccagctaaagaacctacctcagtttcagagaatgaaggcatttcaaccataccaagccctgtgacctcaccagttttgtcccgccgacactatggagaatctataacaaatataggcaaagcaagcatattaggggctgctagcattggaaagggacttggaggaatgttgttctcaagatttggacgttcatctacaacacagtcatctgaaacatcaaaagactcaatggaagatgagaagaagccagttgcctcaccttctgctaccaccgtagggacacagacccttccacatagcagttctggcttcctcgattctgcattggagttggatcacaggattgattttgaactcagagaaggccttgtggagagccgctattggtcagctgtcacgtcgcatactgcctattggtcatccttggatgttgccctttttcttttaaccttcatgtataaacatgagcacgatgatgatgcaaaacccaatttagatccaatctga

SEQ ID NO: 21 - DNA, 2820 bp, Unknown
  Putative membrane protein
gggatttttaaaaaatcaaaatacaaatccaactttttgagttttcgttgtcattgctcttatctttcctgagtcacttcccattttccaaactcagcaaccccagtttgcgagtctggtttcatgaacctttgtaaggtgtttggtgcggtcacrgtgtatacttgccgtgtagtatttgactcagcgcgatctgccttgagtcattttaccgcggccatttactactgccgttgagccctgtccacgccttgggagtgttgatatgttgagagttttctgtctggctgrggagggatcatttagtttttgcggacgtatgttgcactgaggatttagggagagagcaagatttctgttgaggaggttcagaagtataaggaatcgggagagtagataggagtgaagcatttggcagcgtaaagaagcttggcttagctttaatggattagggagagattgctatctagcattattacatgttattgttctctttgctattttatacacctagaacaacctttccctcggggttaacaaacatcttcaactctgttttctgtatggctcctgactcttacctttgttttaggaggcttccctcttcagaggaaactgggagaagccaatttccactgcttctttttcctgtgcctttttaacactcaaacccagaacacttaatcctctgcagctcgtgcaaaaattcagtctgtaatttaaaatgtgtgcacggtacactgctgaccatgggcatgtctattgtttgtatctgtaatgtgtatgtccatttcagtgttgtctgttttagtatgcaggtgatagactagagaacaagacctctgtctccgtagcatcctggagcagtctgaatgccagaatggataaccgttttgctacagcatttgtaattgcttgtgtgcttagcctcatttccaccatctacatggcagcctccattggcacagacttctggtatgaatatcgaagtccagttcaagaaaattccagtgatttgaataaaagcatctgggatgaattcattagtgatgaggcagatgaaaagacttataatgatgcactttttcgatacaatggcacagtgggattgtggagacggtgtatcaccatacccaaaaacatgcattggtatagcccaccagaaaggacagagtcatttgatgtggtcacaaaatgtgtgagtttcacactaactgagcagttcatggagaaatttgttgatcccggaaaccacaatagcgggattgatctccttaggacctatctttggcgttgccagttccttttaccttttgtgagtttaggtttgatgtgctttggggctttgatcggactttgtgcttgcatttgccgaagcttatatcccaccattgccacgggcattctccatctccttgcaggtctgtgtacactgggctcagtaagttgttatgttgctggaattgaactactccaccagaaactagagctccctgacaatgtatccggtgaatttggatggtccttctgcctggcttgtgtctctgctcccttacagttcatggcttctgctctcttcatctgggctgctcacaccaaccggaaagagtacaccttaatgaaggcatatcgtgtggcatgagcaagaaactgcctgctttacaattgccatttttatttttttaaaataatactgatattttccccacctctcaattgtttttaatttttatttgtggatataccattttattatgaaaatctattttatttatacacattcaccactaaatacacacttaataccactaaaatttatgtggtttactttaagcgatgccatctttcaaataaactaatctaggtctagacagaaagaaatggatagagacttgacacaaatttatgaaagaaaattgggagtaggaatgtgaccgaaaacaagttgtgctaatgtctgttagacttttcagtaaaactaaagtaactgtatctgttcaactaaaaactctatattagtttctttgggaaacctctcatcgtcaaaactttatgttcactttgctgttgtagatagccagtcaaccagcagtattagtgctgttttcaaagatttaagctctataaaattgggaaattatctaagatcattttccctaagcattgacacatagcttcatctgaggtgagatatggcagctgtttgtatctgcactgtgtctgtctacaaaaagtgaaaaatacagtgtttacttgaaattttaactttgtaactgcaagaattccagttcagccgggcgaggattagtattatttttaactctccgtaagattttcagtaccaccaaattgttttggattttttttctttcctcttcacataccagggttattaaaagtgtgctttctttttacattatattacagttacaaggtaaaattcctcaactgctatttatttattccagcccagtactataaagaacgtttcaccataatgaccctccagagctgggaaacctaccacaagatctaaagttctggctgtccattaacctccaactatggtctttatttcttgtggtaatatgatgtgcctttccttgcctaaatcccttcctggtgtgtatcaacattatttaatgtcttctaattcagtcatttttttataagtatgtctataaacattgaactttaaaaaacttatttatttattccactactgtagcaattgacagattaaaaaaatgtaacttcataatttcttaccataacctcaatgtcttttttaaaaaataaaattaaaaatgaaaagagaaa

SEQ ID NO: 22 - DNA, 762 bp, Unknown
  Putative membrane protein (GENX-3745 gene)
  exon (1)..(762)
atggataaccgttttgctacagcatttgtaattgcttgtgtgcttagcctcatttccaccatctacatggcagcctccattggcacagacttctggtatgaatatcgaagtccagttcaagaaaattccagtgatttgaataaaagcatctgggatgaattcattagtgatgaggcagatgaaaagacttataatgatgcactttttcgatacaatggcacagtgggattgtggagacggtgtatcaccatacccaaaaacatgcattggtatagcccaccagaaaggacagagtcatttgatgtggtcacaaaatgtgtgagtttcacactaactgagcagttcatggagaaatttgttgatcccggaaaccacaatagcgggattgatctccttaggacctatctttggcgttgccagttccttttaccttttgtgagtttaggtttgatgtgctttggggctttgatcggactttgtgcttgcatttgccgaagcttatatcccaccattgccacgggcattctccatctccttgcaggtctgtgtacactgggctcagtaagttgttatgttgctggaattgaactactccaccagaaactagagctccctgacaatgtatccggtgaatttggatggtccttctgcctggcttgtgtctctgctcccttacagttcatggcttctgctctcttcatctgggctgctcacaccaaccggaaagagtacaccttaatgaaggcatatcgtgtggcatga

SEQ ID NO: 23 - DNA, 1164 bp, Unknown
  No homology
gaaggtttccctgagcgtctctaagctcgcccagccagacaccctgtgcccctccatttgtgtcctctgtccccctttcctgcttccctccttccccaccgtggctggtctaggtgtctgtaatagtcagaatgcaggtttggcaacttgaacaaaacttttaaataacagtggcttaaaccacaaaaaaaaattgatttctctggtaatatctaagcacaagcaggccaggcaatatggggactccctggttttgagatccaggattcccaggtcttggcgctacgaggtccacattctaggcctcaagaccagggaagaaggcagtgaaagggagcatgaccctccccttcaagggcacagctaggaatcacccacatcacctctaattggctggaatgtggtcacacggtcacacctagctgcaaggaaggcagggaaatgtagtctttattctgaccacaacgtgcccaggtgaaatttgtcactagagaaccggtgggcagatatgtgtagataatcaataatctccacctcaggggcattgaggcagcctcttacttcctctgcgtgacaccagagttcgattcccatctgaaacgacccctctttgtaccaccagctccactagggctgcgtaagggagggtggtagttctcaagaaggggagattttgcccccacaggggacatttggcaaagtccagagacattttccgttgtcacaacttggggggtgctatcgccatctagtggggagaggtcaccgatgctgctaaacatcatatgatgcccccaccaacatagagttgtctggcccaaagcatcagcagaagccctgatgcagggaaagcgtgcgttccccggggtcagacacgcctgacttctaaccctgaagccccgcctccctccccgtgtggccttagtgaccaatcagtcacttcacccctcggaacatcgatgatggtaacatggacttccctgcattgtatgagaaccaattcaggtcgtttactgagggcttaccatgtgctgtgtgctctgtgtaccctcagatcacgtgaactccctttccatgcgcacatttactagcacctactatgcggggaagtggattcctctggatgattttgttataataaacagaaaaacagcttgaaaaaaa

SEQ ID NO: 24 - DNA, 910 bp, Unknown
  No homology
ggaccaccctctgccccgtcgtgggcccagcagccaccgaccgagcctttgccctgtgcagacgggaggttctcacggtcctcttgggacccttcgcgtcagcatttcagccttgggagcgccccacccccatctgaggggacccggtccaggctgccgaccctcggcacctctgtccccgttgcagatctctcgccccatcagcagggtgttgtgcaccttgagaagcccccccagtgctcgtggtgccggccaccgagcttgagctctgctctgagggccaccaacccagaacctcgcaggaaggtctccactcctttggaaaagactgcgtttattttcacagtcgacccaaggccgacgacgtgatggggccggcgggccggcaggcaggcgggctcatgttcagcacccctcccctcagctgcaacgtcaacagaaactgtcaggctcctggcctatgggctcgggccggcatgctccgccccatccccaggcccctccccgctcggtttcgggccgactcacacagcacagcgacttgggggcaaggcccagcaggaaatttaaatcgttcctgtgtacgatttactgctaggagcacgacttctgcagatttgagggagcagacttccttcagtcccacgtgatcacatcttgcttgagcttgagcttcttttgcactttcctgaagtcctcagtctctgcattagagttctgcactttctcaaccagttcaactttctcatctgaaagttggtcaggagcctgtctgctagagtcagtttcaaagtcctttccgtgaccctctctgaagatgaaagagacttgcagaaacagagtcaaaccaaactgtcctgtaaatgacaaggatttcaaaatggcaatggacaaagaaatttggttattt

SEQ ID NO: 25 - DNA, 747 bp, Unknown
  No homology
ctctttccccagaaaagaagaaaactttaagcaaatgatccttttaagagagggcaaaaaccgaaatctaatttggcaacagcttcccttcgatatgaaagttcactgacttcgttcagttcgtttccatagtagccaatttgatcatgcacaaaactcttttctttgagttttttcccctcatacattctagaaccttctttttacattaagaatttgtcctagggctgctttccttttttaggacccatttatctttcttaccaaaaccaacaaagacatttccattctttaaattttcttgcctgagaacattcatcctgctttccttagcgcacaaagatgtcttccttctcaattttgagtagctttaatcacatctcttccttagaagtctcagcctttacagaccttgttttcagtagaatctaagaaggaagcaattataaactgtcctttccattagcattctgtggctttacaaatttataaatatatttataatttccagaatcatactacttcctaggacactcttatgataaaaacgtaaggcatctttactaatagacccaaagatcttttggtttctctgtcaaaataagcctgaagtagataaacctctgtctaataactactgtctaatattttatcttatttggaaatgatctagagactccataaatttctatcattcaactgaacttaataaaacttgaaggtgtcaagtaaaaaaaaaaaaaaaaa

SEQ ID NO: 26 - DNA, 2587 bp, Homo sapiens
aaactacaacgaaaaaagacagagctcataatggatgctatccataaacaaaagagcttacaattcaagaaaaccatggatgcaaagaagaactatgagcagaaatgccgggacaaagatgaggcagaacaggccgtcagccggagtgccaacctggtgaacccgaagcaacaagaaaagctttttgtgaaactggcaacttcaaagaccgcagtagaggactcagacaaagcatacatgctgcacatcggcaccctggataaggtccgagaagagtggcagagtgagcacatcaaggcctgcgaggcatttgaggctcaagaatgtgaacgaataaacttctttcggaatgcattgtggttacacatgaatcagctgtcacaacaatgtgtcacaagtgacaacatgtatgaagaagtccgtaagagtttagaaatgtgcagcattgagaaggacattgagtactttgtgaatcaacgtaaaactggacagacaccaccagcacccatcatgtatgagaatttctacagcccccagaagaatgcagccccaccaggaaaggcgacagggcctaacgtagcaaggagaggacctctcccagttcctaaaagcttaccaggtgaccctgattattctttgattggtgactacagcttgatctatcagtaacatcagtgaaaacaaagctttttccagctggtgcttctatggcatggaaggaggcactcagagcagcaggacctatagccacgttatgtcagcaatgaagactttcaagtgaacccttgctataattttttgatattttaaatttatagtagatgtttagttcaacttaagctagtagagttctgcagttttttaaagttgacaaattgcccccgactgaagaattatcctttcccagttactcaggttatgaatgaattaggttttcaacatgggaagcatgaaatccacttctggatttggagcatccacttgaggagcagaggtggcagcagaggattctgagccaccaactgcagtagtggctcctttggctttgggcagcatgactatggaatttccacggcgccacacattctcagtggtccaagatttaaaattaccttcctttttggctggaagacttagaagccatctgattgcactttctcattttacagatgagaaaatgaggcccagatgtgtgaaatcaatttccttacagttcttccagctgattagggacagaactagagcctgagcccaacccacatcactattcttctaacccttcctgaagttgtgatgctcatgctgaaatttaagatgccaaatatttttgccagcactttttcagttgggagaatcaccagggtttaaatgtcagatttatttttatgtggatccctgtgtatgctgaactacagagcatgatgtttaatctaatttaaggagccactgattgtaaaacatgccattattttatgttgcactaagaaggtggggtcgaggagttgccaataaacttgggacagactattgatggccaagcccatctgaatttaagatgctaaagtatgaaaaaaatacatcttagaatcaatgaaataccatattttgattccattcctcaagagaattttagagttaaaaagccagtcctcaatcctgcgtctttgcagagaatctttcccttcctagaccccagaattttaaatgcatccgtcttacactttcacaaatatttgggttttcctttttcactcacaaacagcagggaggtcatgtactttttgtacaacacctgtgcactatgagaaaatggtaccttttagttattgacaagttaaaatagcactctcagtttttcagtattacagagagcaaatattttcctgacctgctctgtgcatagcttacccagaattacggacaagttgattgaaagaagattgattattccctcatctttttttcttttttttgaggcagagtctctctctgtcccccaggctgaagtgcagcggcatgatctcagctcactgcaacctctgcctcccgggttcaagtgattctcctgcctcagcctcctgagtagctgggattacaggcacccaccaccacacctggctaattttttgtatttttagtagagacagggttttaccatgttggtcaggctggtctcaaactcctgacctcaggtgatccacctgcctcggcctcccaaagtgctgggattacaggcgtgagccactgcgcccggcctatttccccacctttcgtgtaaggtgctactgaacatgacagcttcttgttatgacagagaacttgcatcagttggatatccttttgagaaagtgaagtttacaaagggccattgacttccccaaactgaacaggctcaggaaattttccttcgaactcagaacattctgtttttaagtattttatttattgttggcacttcctcagggatttcacttttctccctattggtcagtgtgattgatgtaaaagtgttttctgaaccgaaaatatttgtattttattgctctttcagtttggtaggttaaataaaggttcttggtaatttggg

SEQ ID NO: 27 - DNA, 639 bp, Homo sapien
  exon (1)..(639)
atggatgctatccataaacaaaagagcttacaattcaagaaaaccatggatgcaaagaagaactatgagcagaaatgccgggacaaagatgaggcagaacaggccgtcagccggagtgccaacctggtgaacccgaagcaacaagaaaagctttttgtgaaactggcaacttcaaagaccgcagtagaggactcagacaaagcatacatgctgcacatcggcaccctggataaggtccgagaagagtggcagagtgagcacatcaaggcctgcgaggcatttgaggctcaagaatgtgaacgaataaacttctttcggaatgcattgtggttacacatgaatcagctgtcacaacaatgtgtcacaagtgacaacatgtatgaagaagtccgtaagagtttagaaatgtgcagcattgagaaggacattgagtactttgtgaatcaacgtaaaactggacagacaccaccagcacccatcatgtatgagaatttctacagcccccagaagaatgcagccccaccaggaaaggcgacagggcctaacgtagcaaggagaggacctctcccagttcctaaaagcttaccaggtgaccctgattattctttgattggtgactacagcttgatctatcagtaa

SEQ ID NO: 28 - DNA, 842 bp, Unknown
  No homology
gactttatgaaataaagccacttggaaatattggcctggtaccttgtttacagggttcccagcaagcttactgggtaagtaaagaaggtcatttatctggcaggtgcaaggaacctcaatattttggggaacctcaaaagaagagaatacctcacccaaatctgtaggcgttacaggttttgtctgataagtctttggcttggctttcctggcctcaagaggcctttaaaattcaatctgagattccttattaaaagttccagcaaagcaggtttacaagagcctatatgatcaattgctattcttgctgcacttatgtaaataattgggccaaatttattgaaactaaacttattttgtgaatcagttagtcttaatttggcaacctttgggaaaaatgaggatgattttagagagaaaaattatgtttcagtagaaactatagtacacatttgcagatattagattctagttttgttaactgtctgagtattttgttttctgcctgtaaattgaactggatcctgaattcttctagtcttctgaaatatctggctacaaatctccaaactaatgttttcgattttttccctcatttttatttgaaatcatggagaactaaaaccacctttgttcctgacccctaaaaactaaagctggacaactagatttaaacttaagagacatcaccacaataacatgcctgttgctatgtaagccactcagaaggatacctgaacactcaatgacatcatcagacacacttcaaacagcaaaagatgctccgactctgacatctaaaaatcttcttgactggctgccccctaggctcaggaactgga

SEQ ID NO: 29 - DNA, 661 bp, Unknown
  No homology
caaagaaacccaggcggcagagtcggtctcaaagccagatgtcagtgaagaatctccagggacatcgaaaattaagacagggaagcctgaagaagccggccttgattctagagagaagaagaccaactctgctcccaaaagtgcagcaacaaacggaagctcttctggaaaagtcgggaagcctccgtgtggagccatgaaaaggtccatcgccgacagcgaagaatctgaagcttataagtctctgttcacaactcacagctccgccaagcgctccaaggaggagtcggcgcactgggtcacccacacgtcctactgcttctgaagcccacgcaggcgcggctcaggctccacatggatgggtggcgtgggcgctggctgtgctgggtgttgtgtgccgggcctctgtttgacggcattagaaagttgtccgccgagctggcgtggtcacgctggctgtgggggatggggggtgactcgcagagggaccgtgctgggcacccgccccgtcacctctcccgcaggctcgtgctcactttgcctgcatttgctcctcttctcacagcccggaaagctctgttggctgcactttttgtgtttgaaataattaaagactccagattcctcatgaaaaaaaaaaaaaaaaaactcgagggggccc

SEQ ID NO: 30 - DNA, 1427 bp, Unknown
  Ras homolog gene family
  misc_feature (1272)..(1272): n is a, c, g, or t
ctcgttagtccacggtctggtcttcagctacccgccttcgtctccgagtttgcgactcgcggaccggcgtccccggcgcgaagaggctggactcggattcgttgcctgagcaatggctgccatcaggaagaaactcgtgattgttggtgatggagcctgtggcaagacttgcttgctcatcgtctttagcaaggaccagttcccagaggtgtatgtacccacggtgtttgagaactatgtggcagatatcgaagtggatgggaagcaggtagagttagctttgtgggacacagctgggcaggaagattatgatcgcttgaggcctctctcctacccagacaccgatgttatactgatgtgtttctccattgacagccctgatagtttagaaaacatcccagaaaaatggactcctgaagtcaagcatttctgtcccaacgtgcccatcatcctggttggaaacaagaaggatcttcggaatgatgagcacacaaggcgggagctagccaagatgaagcaggagccggtaaaaccagaagaaggcagagatatggcaaacaggattggtgcttttgggtacatggagtgttcagcaaagaccaaagatggagtgagggaggtttttgaaatggccacgagagctgctctccaatccagacgtgggaagaaaaaatctgggtgccttgtcttgtgaaaccctgctgcgagcacagccctcatgcggttacttttgaagtgctgtttattaatcttagtgtatgattactggccttttccatttatctataatttacctaagattacaaatcagaagtcatcttgctacgagtatttagaagccaaccatgattattaatgatgtccaacccacctgaccctctggggtccttctgacaccgctctaacagccctcctctgcatcccacctgacacaccaggcgctaattcaaggaatttcttaactttttgcttctttctagaaagagaaacagttggtaacttttgtgaattaggctgtaactactttataactaacatgtcctgactgtcatctgtcagctgcaaggtactctggtgagtcaccacttcagagctttactccttaacagatttcatcgcatagctctggagtgggcatccagttttttgaaaatgtactcagccagaaaggcccaagtccgtgagcagctatggcaaagttacagttctgtggtttcatgttagttaccttatagttactgtgtaattagtgccacttaatgtatgttaccnaaaataaatatatctaccccgactagatgtagtattttttgtataattggatttcctaatactgtcatcctcaaagaaagtgtattggttttttaaaaaagaaagtgtatttggaaataaagtcagatggaaaattcaaaaaaaaaaaaaaaaaa

SEQ ID NO: 31 - DNA, 582 bp, Unknown
  Ras homolog gene family, member A
  exon (1)..(582)
atggctgccatcaggaagaaactcgtgattgttggtgatggagcctgtggcaagacttgcttgctcatcgtctttagcaaggaccagttcccagaggtgtatgtacccacggtgtttgagaactatgtggcagatatcgaagtggatgggaagcaggtagagttagctttgtgggacacagctgggcaggaagattatgatcgcttgaggcctctctcctacccagacaccgatgttatactgatgtgtttctccattgacagccctgatagtttagaaaacatcccagaaaaatggactcctgaagtcaagcatttctgtcccaacgtgcccatcatcctggttggaaacaagaaggatcttcggaatgatgagcacacaaggcgggagctagccaagatgaagcaggagccggtaaaaccagaagaaggcagagatatggcaaacaggattggtgcttttgggtacatggagtgttcagcaaagaccaaagatggagtgagggaggtttttgaaatggccacgagagctgctctccaatccagacgtgggaagaaaaaatctgggtgccttgtcttgtga

SEQ ID NO: 32 - DNA, 729 bp, Unknown
  No homology
actcatttatatcttgtagtttactattttacctctagaaatagacttaaaagtagtttgtgtgtgaatatttaactacacgaaagttagcaaaattaacatttggaaaccttctattccatatgttagcatttattccaacatctttttagccttatttagtctaatttaaaattttcaagcaaccctatcttatcatcttcacatggtgtttacaattttgcaacgtggattattctctgtataatatgtgaaattcattgcttgatacttttgacccaaaattatgtttgttacagttgaacttaaataaagatctttaaacaaaaaaaaaaaaaaaaaacgcgagactagttctctcgtgacacccactcttccaccttcgatgctggggctggcattgccctcaacgaccactttgtcaagctcatttcctggtatgacaatgaatttggctacagcaatagggtggtggaccttatggcccacatggcctccaaggagtaagagccccctggaccaccaatcacccagcaagagaaggagaaaggccctcagctgctgggaatgcttgtcccaacttgaccccctaacatattgagagtctcctgacctccacagtttccatctcagacccccctgaagaaggggaggggcttggggagccctaccttgtcatgtaccatcaataaagtacactgtacccaaaaaaaaaaaaaaaaaaaaaaa

SEQ ID NO: 33 - DNA, 902 bp, Unknown
  No homology
tgccaaatgctttttctgcatctattgatatgatcatgatttttcttctttagcctgttgatatgatggattacattaactgatttttgaatgttgaaccaagaatgtgtacctggaataaagcccactttgtagttgtgtataattctttttatatattgttggatttaatttgctaatattttattgaggaattttgcatctatgttcatgagagacaatggtctgtagttttcttttctggtaatgtctttgtctggttttggtatgagggtaatgcttgcttcataggatgagttaggaagtattccttctgattctagcttccagaagagattgtaggagaattgctgtaatttcttccttaaatgttttgtagaattcaccagtgaacccatttgggtctggtgctttctattttggaaggtggttaattattgtttcaatctctttaatagacataggcttattgagattatgtcttcttgtatgagttttggcagatgctgtctttcaaggaattgatctatttcatttaggttattgaatttgtagtcatagagttgtttatagtattcctttattatccttttaatgtccatggaatcagagtgatatcccctatttcatttctgatattagtaatttgtgtcttccctctttgtttcttagtgagactgcctggaagcttatccatttattgataaactacttcttttcgcagaaccagcttttggttttgttgattttctctattgatttcctgttttcaatttcattgatttctgctctaatttttattatttcctttacttctgcttactttggatttaatttactcttctttttctagtttcctaaggtggaagattagattattgattttagatctttcttctttt

SEQ ID NO: 34 - DNA, 744 bp, Unknown
  No homology
gtttaattacactgtgatctgcgagcagacgacatatgccttctattcttttaaattgcttgtgttttatggcccagaatatggtctgtcttgttcaatgttccatgtgagcttgaggagaatgtgtattctgttgttgttgggtaaaatagcctatagatgtcaattatatttactttataattatatccaattatattatgtcttcttgaagagtaagcctctttatcattctctaatgcccttctttatccctgataattttcctcacttggttgtttgctctgtctgaaattaatatagctgctccagctttcttttgcctagtgttagcatggtatatttttctccatccctttacttttaatctgtatgtgtccttatatttatatttaaagtgggtttcctctagatagcatatagttggctcttgttttttgattcactctgattaactctgtcttttagctggtatgtttagaccattgatgtttaaagtgattattgatataggtggattaatatctactgtattatactgttttctactggttgcccttattctttgttcctatttttgtctttcactcttttcctgctttttgtggttttaatgaaaaagatgcttggtctgtattataagttatataacacgaaagaaggcaagcagtgttcaagctactcttgataagttttttacaaggaaataaaacactttatttctcaaaaaaaaaaaaaaaaaaa

SEQ ID NO: 35 - DNA, 1321 bp, Unknown
  Migration-inducing gene
tctccccagctgtatttccaaaatgtcgctttctaacaagctgacgctggacaagctggacgttaaagggaagcgggtcgttatgagagtcgacttcaatgttcctatgaagaacaaccagataacaaacaaccagaggattaaggctgctgtcccaagcatcaaattctgcttggacaatggagccaagtcggtagtccttatgagccacctaggccggcctgatggtgtgcccatgcctgacaagtactccttagagccagttgctgtagaactcaaatctctgctgggcaaggatgttctgttcttgaaggactgtgtaggcccagaagtggagaaagcctgtgccaacccagctgctgggtctgtcatcctgctggagaacctccgctttcatgtggaggaagaagggaagggaaaagatgcttctgggaacaaggttaaagccgagccagccaaaatagaagctttccgagcttcactttccaagctaggggatgtctatgtcaatgatgcttttggcactgctcacagagcccacagctccatggtaggagtcaatctgccacagaaggctggtgggtttttgatgaagaaggagctgaactactttgcaaaggccttggagagcccagagcgacccttcctggccatcctgggcggagctaaagttgcagacaagatccagctcatcaataatatgctggacaaagtcaatgagatgattattggtggtggaatggcttttaccttccttaaggtgctcaacaacatggagattggcacttctctgtttgatgaagagggagccaagattgtcaaagacctaatgtccaaagctgagaagaatggtgtgaagattaccttgcctgttgactttgtcactgctgacaagtttgatgagaatgccaagactggccaagccactgtggcttctggcatacctgctggctggatgggcttggactgtggtcctgaaagcagcaagaagtatgctgaggctgtcactcgggctaagcagattgtgtggaatggtcctgtgggggtatttgaatgggaagcttttgcccggggaaccaaagctctcatggatgaggtggtgaaagccacttctaggggctgcatcaccatcataggtggtggagacactgccacttgctgtgccaaatggaacacggaggataaagtcagccatgtgagcactgggggtggtgccagtttggagctcctggaaggtaaagtccttcctggggtggatgctctcagcaatatttagtactttcctgccttttagttcctgtgcacagcccctaagtcaact

SEQ ID NO: 36 - DNA, 1254 bp, Unknown
  Migration-inducing gene 10 protein
  exon (1)..(1254)
atgtcgctttctaacaagctgacgctggacaagctggacgttaaagggaagcgggtcgttatgagagtcgacttcaatgttcctatgaagaacaaccagataacaaacaaccagaggattaaggctgctgtcccaagcatcaaattctgcttggacaatggagccaagtcggtagtccttatgagccacctaggccggcctgatggtgtgcccatgcctgacaagtactccttagagccagttgctgtagaactcaaatctctgctgggcaaggatgttctgttcttgaaggactgtgtaggcccagaagtggagaaagcctgtgccaacccagctgctgggtctgtcatcctgctggagaacctccgctttcatgtggaggaagaagggaagggaaaagatgcttctgggaacaaggttaaagccgagccagccaaaatagaagctttccgagcttcactttccaagctaggggatgtctatgtcaatgatgcttttggcactgctcacagagcccacagctccatggtaggagtcaatctgccacagaaggctggtgggtttttgatgaagaaggagctgaactactttgcaaaggccttggagagcccagagcgacccttcctggccatcctgggcggagctaaagttgcagacaagatccagctcatcaataatatgctggacaaagtcaatgagatgattattggtggtggaatggcttttaccttccttaaggtgctcaacaacatggagattggcacttctctgtttgatgaagagggagccaagattgtcaaagacctaatgtccaaagctgagaagaatggtgtgaagattaccttgcctgttgactttgtcactgctgacaagtttgatgagaatgccaagactggccaagccactgtggcttctggcatacctgctggctggatgggcttggactgtggtcctgaaagcagcaagaagtatgctgaggctgtcactcgggctaagcagattgtgtggaatggtcctgtgggggtatttgaatgggaagcttttgcccggggaaccaaagctctcatggatgaggtggtgaaagccacttctaggggctgcatcaccatcataggtggtggagacactgccacttgctgtgccaaatggaacacggaggataaagtcagccatgtgagcactgggggtggtgccagtttggagctcctggaaggtaaagtccttcctggggtggatgctctcagcaatatttag

SEQ ID NO: 37 - DNA, 860 bp, Unknown
  No Homology
ggatagtgcagcatcctagagctttggtgtcacacagacccaggttcgagtcttcactttgccacctcttgcctgccgaggggctgtgagctgaatttcctacctcatagggttgtaatgagcagtggatgctgaagcagacacctcttggtcaaggtgactgctcatcccagattctccctttttctgagaatttgttcccctcagtcctcatataggagctgaatggatgagaggcgagcatctggctgtacttgggccagtctggttctctctctcaggaataagcagcgagactcagggatgctgtttccagctctgcaagtcacttacctgaagatatacaaactctggagctgtgagcgtgtgtctacatgtgtgtctctatgtacccaagccttgggggtggtggcggcagggggtggccacctgcatgagtgtattagagaaaatggctcgactcagagagaagatggagatgtgcagagcaaatcagagaccagagggagaccccaggagcctggagaggccagggggaggcgcttcccggagcctgccggcgctcctcctctgggccaaacccttctcgagcctcaaagtccgccctccttcctttgagtcctgtgagatgcccttgttaggatgcattctcttgttttgcttgagctgatttgaagtattatctattacttgcaaccaaaagagctctgaataagataaaatcttgttgctaaagcacagtgtctctcgaatttcggtcatccctgtaccctcctcacaatttttgcatatctatgtaccatctgtatgttttactaataaatattgttctttaaatctttaaaaaaaaaaaaaaaaaa

SEQ ID NO: 38 - DNA, 901 bp, Unknown
  No Homology
gggacctctacttgagtctcaggctcttgctggtggtatttactttctcctttgggctcatcaagtgctggtactataaagaatgatggagattggcagggaaaaactagcattagtaaggtcccagggaggtaatgagatgaaaaatgaacttaaggagggaaaaaaccaaaacgcaagtggaagaagaaggtttccaggtatactgtgaagggtgagcttcaacaaagtaacagaagatgttgagagcaggtaggagaacacccatgagcatcatggaaaagtcctctcaggtaatttatgtatatttttgctttcgtttctttgtgggagcatctttctttgtggaaaaagaaagcgaacaatgacaaagctggagattttctttgggtttattaaaaatcagtacaatttcaacaaagcagaggaaagcaaggagagcaaaagtcaaccttcctgctccctcttattagtaggaagtctaacacaagcttgtcagagttagtttaaaaggtgaggaacaacatgtgtaatttgtgtgtgtgtaattttctgagctgaactgaagcttagcagctttagtttacctaggtttgacgttctttaaagaaatcccttggagaatttgttggaagctaaggaccttcccaaaataatgcgtgtgttcacacgtgtgcactttttggataccacttcacttggttcttggacccttcctaaaactcattggtctctgttctttgctctctgttcacctctattttctacagttaataaatggacatctaatatctgcctaaaaatgtctaagaacagagactctgccttttgttctgtccaacaatggaataggcaaagggttataagaagtccttcgttcggttgatgttggctgttttaa

SEQ ID NO: 39 - DNA, 661 bp, Unknown
  No Homology
ccatggattagttttgtctgtcctttgatttcgtataaatggaatcatacagtatgtactcttttgggtctggttcatccatgttgtagcatatatcagtagttcattcctttttatcgctgagtagtgttcttttggtgaaatacgccacaatttgtccactcatctttagtggacatttgggtagttttcagtttttacaataaggctgctataaacattcttgtacaggtctttttgtaaacatatgctttcatttctcttgtgtaaatacctaagagtagaatcattaggttacagagtaaatgtgggcttaattttataggaaatttcttctgcatttatttgtgctaacctctgaaattcttgattccagttgcagtattcactgttgtctgttcttctaggttttgcatttataaatttgataatgttttctcatatccctgttatataaaaatattaaacaagatggaggagaggatgcaacttttcattaggatgttagataccaacctccaagatgccagagatcaaaactccttgggtgtgatcacgcagcagtgtgtgaacctacttaacaatcctcgtccaggccacatatctccgtctttttaataaataccaaactggaatgaattttaaaaaaaaaaaaaaaaaa

SEQ ID NO: 40 - DNA, 916 bp, Unknown
  No Homology
cagatgatgatccctgggagtaaagaccacaccctcccccaggctttcatatgattcctgaaacagggttttatcttctctctctcttactttcgtgatattttaacaattttaataactgtcattcatttaagaatgtctaaagttagttatgattagtctcctcccaagatatacaagatgacgcatataatttataggtattcactttggttcttttccaaatctgcctggtccttactgaaagagtttttctttttcttattttcaattccttcttttatctgtttaatcacttacacatattttatagtttattgatttgtttagtgctagctgttgctgcaaaaacgcaatcagtctctgtgccatatattccttgcaaacagaaatcagatcaacaggtatttggggctgagtggtcttccttgtgcctatttgagtatacatcttggatcctcctcctccaaacccatactgttctctccattctgcaaggttgagaatggaggattgtattttggaagtttctatcaagtaggcctgaaagtgacacattccataggccagaacttggtcatatggccatagccaaccataagggaaacttggagatgtaatgactccatctctgaatccgagaggaagatgaaatacattgagagaacagctagccagtctacaccacatagtctccgtccaataattctattctgcttttcttgacagattagtgatgcgatttgtttctgtctgctgctgacatcatgatagcttgcttcctcttgtattttgttattttagattcaaagtttccatttggtgcgactttatctcaaaaatcctgtgtcgtctgagttcccagacctcataagtaaagcaatacaaatatgagcacaaaaatccatgtgaatgg

SEQ ID NO: 41 - DNA, 703 bp, Unknown
  No Homology
ggatctagtatcctattccttcctagtgtggagacttccctcctcgtaaatgacaccctttgtaagttcttttatgaatgtctataagtggtagacacctcctgcctcgtggtttctctagaaaatgtctatttcatgcctacgcttaatggtagtttacctgggcttggaattctagaatgatagttaatttttctgagcaccatgaatatataatattatctttcgacattttattgatgttaactttaacgtcaagcttactgttttttgtagttatcctgtcttttttccccaggctgcttgtaagatctgactctgaaatttcctttagaatatttctaggtatagatttattgttacttatccttttggggggtaattatacttctgggatctaacgatttaagataagtctggaatattttcaatcattttcacatcatatattgcctctttcctttcctcaaagacattccattagatatgttagaccatacagttttatcccacaagttcattaaaccttacatatttgtttttcactctaatctgcattccctttagtcctttcttctggttaactaattctgtcttcagttgtatctaaactgttattttacccgtgtaaggtgttttaaattttaataaaacttttgtttataaaattctactttttatacctaaaaaaaaaaaaaaaaaa

SEQ ID NO: 42 - DNA, 4195 bp, Unknown
  Adducin 3 transcript variant 2
gagagaagctgctgctgctaatgctgctgctgctgctgccgccgccgccgctgctgctgctgctgttggtctgaggctgcagtaggtttctgtgcagcattgcagaatccacacctagagaacagaagacacagacacgtacgtctactacccttgttagaaggaagctttggatcttcggtggataacaagagtaatccacagacttaaaacatgagctcagatgccagccaaggcgtgattaccactcctcctcctcccagcatgcctcacaaagagagatattttgaccgcatcaatgaaaatgacccagaatacattagggagaggaacatgtctcctgatctacgacaagacttcaacatgatggagcagaggaaacgagttactcagatcctgcaaagtcctgcctttcgggaagacttggaatgccttattcaagaacagatgaagaaaggccacaacccaactggattactagcattacagcagattgcagattacatcatggccaattctttctcgggtttttcttcacctcctctcagtcttggcatggtcacacctatcaatgaccttcctggtgcagatacatcctcatatgtgaagggagaaaaacttactcgctgtaaacttgccagcctgtacagacttgtagacttgtttggatgggcacacctggcaaatacctatatctcagtaagaataagtaaggagcaagaccacattataataattcccagaggcctatctttttctgaagctacagcctccaatttggtgaaagtcaatataataggagaagtggttgaccagggaagtaccaatttgaaaattgaccatacaggattcagtccccatgctgcaatctattcaacacgtcctgatgttaagtgtgtgatacacatccatacccttgcaacagcagctgtatcctccatgaaatgtgggatccttccaatttctcaagagtctcttcttctgggagatgttgcctattatgactaccaagggtcacttgaagaacaggaggagagaattcaactgcagaaggttctgggaccaagttgtaaggtgctggtactcaggaatcatggtgtggttgcacttggagaaacattagaggaggcttttcattatatttttaatgtgcaactagcctgtgagattcaggtgcaggccctagcaggtgcaggtggagtagacaatctccatgtactggactttcagaagtataaagctttcacttacactgtagcagcgtctggtggaggaggtgtgaatatgggttcccatcaaaaatggaaggttggcgaaattgagtttgaagggcttatgaggactctggacaacttggggtatagaacaggctatgcttacaggcatcctctcattcgagagaagcctaggcacaagagtgatgtggaaatcccagcaactgtgactgctttttcctttgaagacgatacagtgccactctctcctctcaaatacatggcacagaggcaacagcgtgaaaaaacaagatggctgaactcaccaaatacttacatgaaagtgaatgtgcctgaggagtctcggaacggagaaaccagtccccgaaccaaaatcacgtggatgaaagcagaagactcatctaaagttagtggtggaacacctatcaaaattgaagatccaaatcagtttgttcctttaaacacaaacccgaatgaggtactagaaaagagaaataagattcgggaacaaaatcgatatgacttgaaaacagcaggaccacaatctcagttgcttgctggaattgttgtggataagccaccttctactatgcaatttgaagatgatgatcatggcccaccagctcctcctaacccatttagtcatctcacagaaggagaacttgaagagtataagaggacaatcgaacgtaaacaacaaggcctagaagaaaaccatgagctgttttccaagagcttcatctccatggaagtgcctgtcatggtagtaaatggcaaggatgatatgcatgatgttgaagatgagcttgctaagcgagtgagtaggttaagcacaagtacaaccatagaaaacatcgagattactattaagtctccagagaaaatcgaagaagtcctgtcacctgaaggctccccttcaaaatcgccatccaagaaaaagaagaaattccgcactccttcttttctgaaaaagaacaaaaaaaaggagaaagttgaggcctaaataaagtctttttataattattattataacaatgtgacattgcacatctaaataccacatttaagttgatcattaatatgcaatggtagatcagattgggggatgtagcaaactggactttaagaactggaaagaggttttacaaaagaaaaactttcagattcatctctcattttatatgtccagaaatggctttgaattttaagcaattactagttttaattagctctgccctcatgaagtattattataattcaccataaacagctatctgtctgaattacttcaggccttctccataatatctgttagaaagaaattgccagtgagcaagtgagaatttttatttctcaatacctgcttcacttgataatcatattataattttttatcatgattattgactatatttttggagtcccattgtttcagtgggcattaacagaatgctttaaaaacttctaagacaagaatctatagcattagtatacactggcacataattttttaaaaagttttaagaaaagattcatttggaattttattcacagtataaaatttcctcacctgaagtaactttgtttgccaaaaaagttgttttaataaactataatttttgaaaacttccttttttattagtttagaaagccccttatttttcaacaaaggggattttgtacacataacatgggttatttagtttaactctggcaaaaaaaaaaaaaaaaattttgtatgttgatgtttgtataccgttcagtataaaagtgtcctaagcatattagccaatcttttcacagtagagcatacttaaggctgcttggtactgagtatacttaaatataactccagaatccagggacttggtgttaaaacaggattagagcatgtaaaggtacatctagattcatatttgaatcttaaactgtatttttctcttagtattgctaatgagtaaagaaaagtctcataaggtagccaaatgaaaaagaatgaaagggaaagtgaaaaattaaggggacaaaagatgggatgtgaaaagaagaattctagtttgatggtgactcatattcacgataggatacaaagtgtgatttgttggaaacatgtcccaaatttctaaaattctgcttctctgccaaaagcaatgtctttcttggttgatatttgagttttaaaagggtcaaatctttctaattttttgtatctttagagggcagcactagaagaaatcagcaggtctaatcccaccagtaagaaaactaccacttcttgatttttacagatttaaaaaaatcttttcagtgacctttctttttaatgtaaatacaaatttaaacctaggcttaatataggcgtttcccctttcacccaagtgatgtcacagttcgatgcaaaatcaatgatccagaatgatcgtgggtaaaaataactcaaagtgtttcttaagggtgagttggcatgcaaaaaattacattgattacagtgtgttttggagctggctctgtttgtgtgcatatgataatgcagagttgagccagagcctggaaatgtcattctagatctcactaactactggaatcagtgttttaatctcttggtggaaactttcagttgcttaactctctattggaagatttttttaatgttctacatcatttatgttgtattacaatgtatgtagaaatagtaacctgtgaactatgcttttccataactttttaaaaatatatatatctaaatgaatgcaatgtgcataaatattttttaaacataacagtgaactattgcaccttttgctaatgcctctatttacttgctttggcataaagaatgagccaatgaacctctgtgtcctgtggaaaaatgtataaatgttatctgatattgctcttagatgtaatgctaattaatgttaaatcacaaataaacagtattttaaatataaaaaaaaaaa

SEQ ID NO: 43 - DNA, 2025 bp, Unknown
  Adducin 3 (gamma) (ADD3), transcript variant 2
  exon (1)..(2025)
atgagctcagatgccagccaaggcgtgattaccactcctcctcctcccagcatgcctcacaaagagagatattttgaccgcatcaatgaaaatgacccagaatacattagggagaggaacatgtctcctgatctacgacaagacttcaacatgatggagcagaggaaacgagttactcagatcctgcaaagtcctgcctttcgggaagacttggaatgccttattcaagaacagatgaagaaaggccacaacccaactggattactagcattacagcagattgcagattacatcatggccaattctttctcgggtttttcttcacctcctctcagtcttggcatggtcacacctatcaatgaccttcctggtgcagatacatcctcatatgtgaagggagaaaaacttactcgctgtaaacttgccagcctgtacagacttgtagacttgtttggatgggcacacctggcaaatacctatatctcagtaagaataagtaaggagcaagaccacattataataattcccagaggcctatctttttctgaagctacagcctccaatttggtgaaagtcaatataataggagaagtggttgaccagggaagtaccaatttgaaaattgaccatacaggattcagtccccatgctgcaatctattcaacacgtcctgatgttaagtgtgtgatacacatccatacccttgcaacagcagctgtatcctccatgaaatgtgggatccttccaatttctcaagagtctcttcttctgggagatgttgcctattatgactaccaagggtcacttgaagaacaggaggagagaattcaactgcagaaggttctgggaccaagttgtaaggtgctggtactcaggaatcatggtgtggttgcacttggagaaacattagaggaggcttttcattatatttttaatgtgcaactagcctgtgagattcaggtgcaggccctagcaggtgcaggtggagtagacaatctccatgtactggactttcagaagtataaagctttcacttacactgtagcagcgtctggtggaggaggtgtgaatatgggttcccatcaaaaatggaaggttggcgaaattgagtttgaagggcttatgaggactctggacaacttggggtatagaacaggctatgcttacaggcatcctctcattcgagagaagcctaggcacaagagtgatgtggaaatcccagcaactgtgactgctttttcctttgaagacgatacagtgccactctctcctctcaaatacatggcacagaggcaacagcgtgaaaaaacaagatggctgaactcaccaaatacttacatgaaagtgaatgtgcctgaggagtctcggaacggagaaaccagtccccgaaccaaaatcacgtggatgaaagcagaagactcatctaaagttagtggtggaacacctatcaaaattgaagatccaaatcagtttgttcctttaaacacaaacccgaatgaggtactagaaaagagaaataagattcgggaacaaaatcgatatgacttgaaaacagcaggaccacaatctcagttgcttgctggaattgttgtggataagccaccttctactatgcaatttgaagatgatgatcatggcccaccagctcctcctaacccatttagtcatctcacagaaggagaacttgaagagtataagaggacaatcgaacgtaaacaacaaggcctagaagaaaaccatgagctgttttccaagagcttcatctccatggaagtgcctgtcatggtagtaaatggcaaggatgatatgcatgatgttgaagatgagcttgctaagcgagtgagtaggttaagcacaagtacaaccatagaaaacatcgagattactattaagtctccagagaaaatcgaagaagtcctgtcacctgaaggctccccttcaaaatcgccatccaagaaaaagaagaaattccgcactccttcttttctgaaaaagaacaaaaaaaaggagaaagttgaggcctaa

SEQ ID NO: 44 - DNA, 1904 bp, Unknown
  phosphogluconate dehydrogenase
cgcgtcgccgctcttcggttctgctctgtccgccgccatggcccaagctgacatcgcgctgatcggattggccgtcatgggccagaacttaattctgaacatgaatgaccacggctttgtggtctgtgcttttaataggactgtctccaaagttgatgatttcttggccaatgaggcaaagggaaccaaagtggtgggtgcccagtccctgaaagagatggtctccaagctgaagaagccccggcggatcatcctcctggtgaaggctgggcaagctgtggatgatttcatcgagaaattggtaccattgttggatactggtgacatcatcattgacggaggaaattctgaatatagggacaccacaagacggtgccgagacctcaaggccaagggaattttatttgtggggagcggagtcagtggtggagaggaaggggcccggtatggcccatcgctcatgccaggagggaacaaagaagcgtggccccacatcaagaccatcttccaaggcattgctgcaaaagtgggaactggagaaccctgctgtgactgggtgggagatgagggagcaggacactttgtgaagatggtgcacaatggcatagagtacggcgatatgcagctgatctgtgaagcttaccatctgatgaaagacgttctgggcatggagcataacgagatggcaaaggcatttgaggagtggaataagacagagctagactcattcctgattgaaatcacagccaatattctcaagtttcaagataccgatggcaagtacctgctgccaaagatcagggacagtgcggggcagaagggcactgggaagtggactgccatctcggccctggagtacggtgttcccgtcaccctcatcggagaagcggtctttgctcgatgcttatcgtctctgaaggatgagaggattcaagctagcgggaagctgaagggtcctcgaaagatccagtttgaaggtgataagaaatctttcctggaggacattcgaaaggccctctatgcttccaagatcatctcttatgctcagggctttatgctgctaagacaggcagccactgaatttggctggaccctcaactacggcggcattgccctgatgtggaggggcggctgcatcatcagaagtgtgttcctaggaaaaataaaagatgcatttgatcgaaacccagaacttgagaatctgctgctggatgacttcttcaggtcggctgttgaaagctgccaggactcctggcggcgggcagtcagtactggtgtccagatgggcattcccatgccctgcttcaccactgctctttccttctatgatggatacagacatgaaatgctaccagccaacctaatccaggctcagcgggattactttggggctcacacgtatgaactcttagccaaacccggacagtttatccacactaattggacaggccatggcggcagtgtgtcatcctcttcgtacaatgcctaatcagactccttgtgttacccaccacgattccatagaccaggacattccatttgccacacagcactgcttacatggccctttgccctattttctgctcacatctcttaaagtgttgtaagagactcctgaaaaagtcaacctgagtttatttgtaaggtagttctgtgagaaccgtcatgccctctgcccttgtctcttgggactgaccaggaagtgatcatgttcgtgagagtgggaaccatctccttgcggcagtggcttccgcgtgccccgtgtgctggtgcggttcccatcacgcagacaggaagggtgtttgcgcactctgatcaactggaacctttgtatcatgcaggtgaattccctttttcctctacttaataaaagctacatcacactgaaaaaaaaaaaaaaaaaa

SEQ ID NO: 45 - DNA, 1452 bp, Unknown
  Phosphogluconate dehydrogenase
  exon (1)..(1452)
atggcccaagctgacatcgcgctgatcggattggccgtcatgggccagaacttaattctgaacatgaatgaccacggctttgtggtctgtgcttttaataggactgtctccaaagttgatgatttcttggccaatgaggcaaagggaaccaaagtggtgggtgcccagtccctgaaagagatggtctccaagctgaagaagccccggcggatcatcctcctggtgaaggctgggcaagctgtggatgatttcatcgagaaattggtaccattgttggatactggtgacatcatcattgacggaggaaattctgaatatagggacaccacaagacggtgccgagacctcaaggccaagggaattttatttgtggggagcggagtcagtggtggagaggaaggggcccggtatggcccatcgctcatgccaggagggaacaaagaagcgtggccccacatcaagaccatcttccaaggcattgctgcaaaagtgggaactggagaaccctgctgtgactgggtgggagatgagggagcaggacactttgtgaagatggtgcacaatggcatagagtacggcgatatgcagctgatctgtgaagcttaccatctgatgaaagacgttctgggcatggagcataacgagatggcaaaggcatttgaggagtggaataagacagagctagactcattcctgattgaaatcacagccaatattctcaagtttcaagataccgatggcaagtacctgctgccaaagatcagggacagtgcggggcagaagggcactgggaagtggactgccatctcggccctggagtacggtgttcccgtcaccctcatcggagaagcggtctttgctcgatgcttatcgtctctgaaggatgagaggattcaagctagcgggaagctgaagggtcctcgaaagatccagtttgaaggtgataagaaatctttcctggaggacattcgaaaggccctctatgcttccaagatcatctcttatgctcagggctttatgctgctaagacaggcagccactgaatttggctggaccctcaactacggcggcattgccctgatgtggaggggcggctgcatcatcagaagtgtgttcctaggaaaaataaaagatgcatttgatcgaaacccagaacttgagaatctgctgctggatgacttcttcaggtcggctgttgaaagctgccaggactcctggcggcgggcagtcagtactggtgtccagatgggcattcccatgccctgcttcaccactgctctttccttctatgatggatacagacatgaaatgctaccagccaacctaatccaggctcagcgggattactttggggctcacacgtatgaactcttagccaaacccggacagtttatccacactaattggacaggccatggcggcagtgtgtcatcctcttcgtacaatgcctaa

SEQ ID NO: 46 - DNA, 1666 bp, Unknown
  Immunoglobulin superfamily member 6 variant
atacacagaaatggggactgcgagcagaagcaacatcgctcgccatctgcaaaccaatctcattctattttgtgtcggtgctgtgggcgcctgtactctctctgtcacacaaccgtggtacctagaagtggactacactcatgaggccgtcaccataaagtgtaccttctccgcaaccggatgcccttctgagcaaccaacatgcctgtggtttcgctacggtgctcaccagcctgagaacctgtgcttggacgggtgcaaaagtgaggcagacaagttcacagtgagggaggccctcaaagaaaaccaagtttccctcactgtaaacagagtgacttcaaatgacagtgcaatttacatctgtggaatagcattccccagtgtgccggaagcgagagctaaacagacaggaggagggaccacactggtggtaagagaaattaagctgctcagcaaggaactgcggagcttcctgacagctcttgtatcactgctctctgtctatgtgaccggtgtgtgcgtggccttcatactcctctccaaatcaaaatccaaccctctaagaaacaaagaaataaaagaagactcacaaaagaagaagagtgctcggcgtatttttcaggaaattgctcaagaactataccataagagacatgtggaaacaaatcagcaatctgagaaagataacaacacttatgaaaacagaagagtactttccaactatgaaaggccatagaaacgttttaattttcaatgaagtcactgaaaatccaactccaggagctatggcagtgttaatgaacatatatcatcaggtcttaaaaaaaaataaaggtaaactgaaaagacaactggctacaaagaaggatgccagaatgtaaggaaactataactaatagtcattaccaaaatactaaaacccaacaaaatgcaactgaaaaataccttccaaatttgccaagaaaaaaaattctattttaaacttgtatcctgagtctgtttcattcaacatgagatgtgtgatgactgccatcctgaagatctgaagccaaaccatgtgcctcagtcttgagtggaagaatcacctttatggtttgtggaaatcatggcacaattaaaataagttgggagggacaacgtgacaaaatttgagttagagacattcattttgaaaagcaccttagtaaagttatttcctctgatgttgtaatggggcagtggggtaacgcacatttgcctgccagggtatgcaaagtaacttacatcatgctatcagcaaaatgagaataatatagtggctagagtaagaccataaaagccaaaatacagaaaatccaaagctgaaggttaaacagaggtaacttcagaacaaataagccacaacggactctagatgtcagtgttgtgccaaataacagcaccagggaagatgtgggcaacacatctactttacaagcacgtttgtaatactgattttttttcttttcttttttttttttttttgagacagagtctcgttctgttgcccagggtggagtgcagtggtgcaatctcggctcactgcaacctccacctcccgggttcatgccattcttctgcctcagtttcccaagtagctgggattgcaggtgcgcaccaccacgcccggctaatttttttttttttt

SEQ ID NO: 47 - DNA, 726 bp, Unknown
  Immunoglobulin superfamily, member 6 variant
  exon (1)..(726)
atggggactgcgagcagaagcaacatcgctcgccatctgcaaaccaatctcattctattttgtgtcggtgctgtgggcgcctgtactctctctgtcacacaaccgtggtacctagaagtggactacactcatgaggccgtcaccataaagtgtaccttctccgcaaccggatgcccttctgagcaaccaacatgcctgtggtttcgctacggtgctcaccagcctgagaacctgtgcttggacgggtgcaaaagtgaggcagacaagttcacagtgagggaggccctcaaagaaaaccaagtttccctcactgtaaacagagtgacttcaaatgacagtgcaatttacatctgtggaatagcattccccagtgtgccggaagcgagagctaaacagacaggaggagggaccacactggtggtaagagaaattaagctgctcagcaaggaactgcggagcttcctgacagctcttgtatcactgctctctgtctatgtgaccggtgtgtgcgtggccttcatactcctctccaaatcaaaatccaaccctctaagaaacaaagaaataaaagaagactcacaaaagaagaagagtgctcggcgtatttttcaggaaattgctcaagaactataccataagagacatgtggaaacaaatcagcaatctgagaaagataacaacacttatgaaaacagaagagtactttccaactatgaaaggccatag

SEQ ID NO: 48 - DNA, 3368 bp, Unknown
  Toll-like receptor 8
ctcctgcatagagggtaccattctgcgctgctgcaagttacggaatgaaaaattagaacaacagaaacgtggttctcttgacacttcagtgttagggaacatcagcaagacccatcccaggagaccttgaaggaagcctttgaaagggagaatgaaggagtcatctttgcaaaatagctcctgcagcctgggaaaggagactaaaaaggaaaacatgatccttcagcctttgcttctgacctgccttttcctgataatctctgattcctgtgagttcttcactgaaacaaattattctagaagctatccttgtgatgagaaaagggaaaatgtttctgtcattgcagagtgcaacgatcgccgactggaagaagttccccaaacagtgggcaagtacgtgacagaactagacctatctgataatttcatcatccacataacaaatgaatcatttcaagggctgcaaaatcttactaaaataaatctaaaccacaaccccaatgtacagcaccagaacggaaatcccggtatacaatcaaatggcatgaatattacagatggggcattcctcaacctacaaaacctaagagagttactgcttgaagacaaccagttagacaaaatacccactggtttgccagggtctttaagagaacttagtctaattcaaaacaatatatacaacataactaaagagggcatttcaagacttatgaatttggaatatctctatttgggctggaactgctattttggcaacatttgcaataaaacttttgacatagaagacggaacatttgaaaggcttacaaacttgaaggtgctatcattatcttttaacaacctttctcatgtgccacccaaactgccaaactccttgagagagctttatcttagcaacaccaagatcaaatacatcactcaagaagacttcaaggaattgagaaatttgacagtactggatctaagcgggaactgtccaaggtgcttcaatgcaccatttccatgcgtgccttgtgatggtggtgcttcaattaatatagatcgttttgcttttcaaaacttgacccaacttcgatacctaaacctctctagcacttccctcaggaagattaatgctgcctggtttaaaaatatgcctcatctgaaggtgctggatcttgaattcaactatttagtgggagaaatagcctctggggcatttttaacgatgctgccccgcttagaaatacttgacttgtcttttaactatataaaggggagttatccacagcatattaatatttccagaaacttctctaaacctttgtctctacgggcattgcatttaagaggttatgtgttccaggaactcagagaagatgatttccagcccctgatgcagcttccaaacttatcgactatcaacttgggtattaattttattaagcaaatcgatttcaaacttttccaaaatttctccaatctggaaattatttacttgtcagaaaacagaatatcaccgttggtaaaagatacccggcagagttatgcaaatagttcctcttttcaacgtcatatccggaaacgacgctcaacagattttgagtttgacccacattcgaacttttatcatttcacccgtcctttaataaagccacaatgtgctgcttatggaaaagccttagatttaagcctcaacagtattttcttcattgggccaaaccaatttgaaaatcttcctgacattgcctgtttaaatctgtctgcaaatagcaatgctcaagtgttaagtggaactgaattttcagccattcctcatgtcaaatatttggatttgacaaacaatagactagactttgataatgctagtgctcttactgaattgtccgacttggaagttctagatctcagctataattcacactatttcagaatagcaggcgtaacacatcatctagaatttattcaaaatttcacaaatctaaaagttttaaacttgagccacaacaacatttatactttaacagataagtataacctggaaagcaagtccctggtagaattagttttcagtggcaatcgccttgacattttgtggaatgatgatgacaacaggtatatctccattttcaaaggtctcaagaatctgacacgtctggatttatcccttaataggctgaagcacatcccaaatgaagcattccttaatttgccagcgagtctcactgaactacatataaatgataatatgttaaagttttttaactggacattactccagcagtttcctcgtctcgagttgcttgacttacgtggaaacaaactactctttttaactgatagcctatctgactttacatcttcccttcggacactgctgctgagtcataacaggatttcccacctaccctctggctttctttctgaagtcagtagtctgaagcacctcgatttaagttccaatctgctaaaaacaatcaacaaatccgcacttgaaactaagaccaccaccaaattatctatgttggaactacacggaaacccctttgaatgcacctgtgacattggagatttccgaagatggatggatgaacatctgaatgtcaaaattcccagactggtagatgtcatttgtgccagtcctggggatcaaagagggaagagtattgtgagtctggagctaacaacttgtgtttcagatgtcactgcagtgatattatttttcttcacgttctttatcaccaccatggttatgttggctgccctagctcaccattggttttactgggatgtttggtttatctatcacatgtgtttagctaagataaaaggctacaggtctctttccacatcccaaactttctacgatgcttacgtttcttatgacaccaaagacgcctctgttacggactgggtgataaatgagctgcgcttccacctagaagagagtgaagaaaaaaacgtgctcctctgtttagaggagagggattgggacccgggattagccatcatcgataacctcatgcagagcataaaccaaagcaagaagacaatatttgttttaaccaaaaaatatgcaaagaactggaactttaaaacagcattctacttggccttgcagaggctaatggatgagaatatggatgtgattgtatttattctgctggagccagtgttacagcattcccagtatttgcggctgcggcaaaggatctgcaagagctccatcctccagtggcctgacaaccccaaggcagaaggcttgttttggcaaagtctgaaaaatgtggtcttaactgaaaataattcacggtataacatttgtatgttgattccattaagcatactaactgatgttaagtcatgatttcgcgccataataaaga

SEQ ID NO: 49 - DNA, 3198 bp, Unknown
  Toll-like receptor 8 (TLR8)
  exon (1)..(3198)
atgaaggagtcatctttgcaaaatagctcctgcagcctgggaaaggagactaaaaaggaaaacatgatccttcagcctttgcttctgacctgccttttcctgataatctctgattcctgtgagttcttcactgaaacaaattattctagaagctatccttgtgatgagaaaagggaaaatgtttctgtcattgcagagtgcaacgatcgccgactggaagaagttccccaaacagtgggcaagtacgtgacagaactagacctatctgataatttcatcatccacataacaaatgaatcatttcaagggctgcaaaatcttactaaaataaatctaaaccacaaccccaatgtacagcaccagaacggaaatcccggtatacaatcaaatggcatgaatattacagatggggcattcctcaacctacaaaacctaagagagttactgcttgaagacaaccagttagacaaaatacccactggtttgccagggtctttaagagaacttagtctaattcaaaacaatatatacaacataactaaagagggcatttcaagacttatgaatttggaatatctctatttgggctggaactgctattttggcaacatttgcaataaaacttttgacatagaagacggaacatttgaaaggcttacaaacttgaaggtgctatcattatcttttaacaacctttctcatgtgccacccaaactgccaaactccttgagagagctttatcttagcaacaccaagatcaaatacatcactcaagaagacttcaaggaattgagaaatttgacagtactggatctaagcgggaactgtccaaggtgcttcaatgcaccatttccatgcgtgccttgtgatggtggtgcttcaattaatatagatcgttttgcttttcaaaacttgacccaacttcgatacctaaacctctctagcacttccctcaggaagattaatgctgcctggtttaaaaatatgcctcatctgaaggtgctggatcttgaattcaactatttagtgggagaaatagcctctggggcatttttaacgatgctgccccgcttagaaatacttgacttgtcttttaactatataaaggggagttatccacagcatattaatatttccagaaacttctctaaacctttgtctctacgggcattgcatttaagaggttatgtgttccaggaactcagagaagatgatttccagcccctgatgcagcttccaaacttatcgactatcaacttgggtattaattttattaagcaaatcgatttcaaacttttccaaaatttctccaatctggaaattatttacttgtcagaaaacagaatatcaccgttggtaaaagatacccggcagagttatgcaaatagttcctcttttcaacgtcatatccggaaacgacgctcaacagattttgagtttgacccacattcgaacttttatcatttcacccgtcctttaataaagccacaatgtgctgcttatggaaaagccttagatttaagcctcaacagtattttcttcattgggccaaaccaatttgaaaatcttcctgacattgcctgtttaaatctgtctgcaaatagcaatgctcaagtgttaagtggaactgaattttcagccattcctcatgtcaaatatttggatttgacaaacaatagactagactttgataatgctagtgctcttactgaattgtccgacttggaagttctagatctcagctataattcacactatttcagaatagcaggcgtaacacatcatctagaatttattcaaaatttcacaaatctaaaagttttaaacttgagccacaacaacatttatactttaacagataagtataacctggaaagcaagtccctggtagaattagttttcagtggcaatcgccttgacattttgtggaatgatgatgacaacaggtatatctccattttcaaaggtctcaagaatctgacacgtctggatttatcccttaataggctgaagcacatcccaaatgaagcattccttaatttgccagcgagtctcactgaactacatataaatgataatatgttaaagttttttaactggacattactccagcagtttcctcgtctcgagttgcttgacttacgtggaaacaaactactctttttaactgatagcctatctgactttacatcttcccttcggacactgctgctgagtcataacaggatttcccacctaccctctggctttctttctgaagtcagtagtctgaagcacctcgatttaagttccaatctgctaaaaacaatcaacaaatccgcacttgaaactaagaccaccaccaaattatctatgttggaactacacggaaacccctttgaatgcacctgtgacattggagatttccgaagatggatggatgaacatctgaatgtcaaaattcccagactggtagatgtcatttgtgccagtcctggggatcaaagagggaagagtattgtgagtctggagctaacaacttgtgtttcagatgtcactgcagtgatattatttttcttcacgttctttatcaccaccatggttatgttggctgccctagctcaccattggttttactgggatgtttggtttatctatcacatgtgtttagctaagataaaaggctacaggtctctttccacatcccaaactttctacgatgcttacgtttcttatgacaccaaagacgcctctgttacggactgggtgataaatgagctgcgcttccacctagaagagagtgaagaaaaaaacgtgctcctctgtttagaggagagggattgggacccgggattagccatcatcgataacctcatgcagagcataaaccaaagcaagaagacaatatttgttttaaccaaaaaatatgcaaagaactggaactttaaaacagcattctacttggccttgcagaggctaatggatgagaatatggatgtgattgtatttattctgctggagccagtgttacagcattcccagtatttgcggctgcggcaaaggatctgcaagagctccatcctccagtggcctgacaaccccaaggcagaaggcttgttttggcaaagtctgaaaaatgtggtcttaactgaaaataattcacggtataacatttgtatgttgattccattaagcatactaactgatgttaagtcatga

SEQ ID NO: 50 - DNA, 705 bp, Unknown
  No homology
gattcactcctttttgggtaatctttggtgactttgcacctggtgactatcaaaaagcctgttattatgttaagataactttaacctcatgacaatgttactatatcaaaaaaaaatgatattttgattaaaaaaaatcttgcatttcccccctttgaattatatattactgtaaaacctttagtttcttgaaatttggttagactccaaataacttaaaactgttcttaataaccatcaggtcactttatttggctaaatggtgaataacttttacatcttcagcatttcttaaaggaaaagttaattctacttgtgtgtgtgtgcatatgtgtatatgtatatgtattgttgtatgtatatatgtatagatggataaaatatagtctttagacaactttcttttagagatctttactgcagtatattgttctcaactcaggtgccaaaggagctctcttcttacgacatgtaaatatacatttaaattctttaagaagtagcttgttggttcaataaactagccattgcagaagctaaattgggctcttgtatatctaaaactgatgagtttttcctaaaatgttgattgtccatgtatttgccttcagcattaagctaatgcaggtacagcttaataagacattgcaaaaagaggaaatgattacttttacaaaagaccatactatatttttaaatttctag

SEQ ID NO: 51 - DNA, 668 bp, Unknown
  No homology
gcagtgaaattgtaatggcacttgaaagaagtaagcagcacccgttctccggtctgtagcgatttgaggcgcctgtgccagattataatcaacacatcgcttcctttatcaagaaagtctggttataaaaaaaagtcagctgatgagtgacacacttagctttctttctggcacaagctcactctttcatgttggatggatcacaaatcgttcatagaccatattttgaatagccttgttctaagcaacatttataaatgttgatattttataactgtttacatttcttctgtttatttttggatattcagtgtgatatctgacttagaaacttgtccttattcattgttgtatagacaattgtactttaattttaaattgtgttaaaattaagttatctgacttccaatttggggaattattatcaatttataattttataaaagtttaaagaactttaaactgtaattgtaaatttcacacaagttacaactgccctccatcttaacttttattaaataatcatgttgcttaagtcatattgaccgacgttattatgaatactccaggaaaaaaaaaaacgcttattacatcaacttaatgatcctttggttaaaaattaaaaagcactttttttatgttaaaaaaaaaaaaaaaaaaaaaaaaaa

SEQ ID NO: 52 - DNA, 1937 bp, Unknown
  Hypothetical protein FLJ20481
caggcgtctaagtaacttcagcgcctgcgcagaggctccccagcgtcgccctaggctgggactctagtaggtcttcggctcagttttggctgcagcgcccgcgtagatcgcttcggccgggttctacgcccggctcaactatgagccggtgcgcccaggcggcggaagtggcggccacagtgccaggtgccggcgtcgggaacgtggggctgcggccgcccatggtgccccgtcaggcgtccttcttcccgccgccggtgccgaaccccttcgtgcagcagacgcagatcggctccgcgaggcgggtccagattgtccttcttgggattatcttgcttccaattcgtgtcttattggttgcattaattttattactggcatggccatttgctgcgatttcaacagcatgctgtcctgaaaagctgacccacccagtaactggttggaggaggaaaattacccaaccggttttgaagttcctgggtcgtgccttgttcttttcaatgggatttatagttactgtgaaaggaaaggtcgcaaatgctgtggaagccccaatttttgtggttgcccctcactcaacgttctttgatgggattgcctgtgtcatagctggcttaccgtctatggtgtctcgaaatgagaatgcacaggcccctctggttggcagactgttacgagctcttcaaccagtgctggtgtcccgtgttgatccagattctcgaaagaacacaataaatgaaataataaggcgtgccacttcaggaggggaatggccccagatgctagttttcccagaaggtacttgtactaatcgttcctgtttgattacttttaaaccaggggccttcattccaggagttcccgttcagccaatcctcctcagatacccaaacaagctggatactgtgacttggacgtggcaaggatatacattcattcagctttgtatgcttactttctgtcagcccttcacaagggtggaagttgagtttatgccagttcaagtaccaaatgaagaagaaagaaatgatccggtcctttttgccgatagagtccggaatttaatggctcaagctctggggattccagtaacagaccacacctatgaagactgcagattgatgatttcagcaggacagctaacattgcctatggaagctgggctggtggaatttactaaaattagccgaaaattgaaattagattgggatggtgttcgtaagcatttggatgaatatgcatctattgcgagttcctcaaaaggaggaagaattggaattgaagaattcgccaagtatttaaagttgcctgtttcagatgtcttgagacaactttttgcactctttgacaggaaccatgatggcagcattgacttccgagagtatgtgattggcctggctgtcttgtgcaacccttccaacacagaggagatcatccaggtggcatttaagctgtttgacgttgatgaggatggctacataacggaggaagagttctccaccattctacaggcttcccttggagtgcctgaccttgatgtttctggtctcttcaaggaaatagctcagggcgattctgtgtcgtacgaggaatttaaaagttttgccctgaagcatccagaatatgctaagatatttacaacatacttagacctccagacgagccatgtgttttcactgccaaaagaagctcaggcaactccctcattcacaagtaataaagtcagtcctgaaaatcgtgaagagagcgcctcagacaagaaggatgactgaaagcagtatttccaataaggaaaacacagtagcttttgcttgaaattgtaaaggcacttattgataatacttttaatgtgttggtaatgatgtttaaaattgaaagatttttaaaataaaaatgatagattttcttactaaaaaaaaaaaaaaaaaaaaaaa

SEQ ID NO: 53 - DNA, 1635 bp, Unknown
  Hypothetical protein FLJ20481
  exon (1)..(1635)
atgagccggtgcgcccaggcggcggaagtggcggccacagtgccaggtgccggcgtcgggaacgtggggctgcggccgcccatggtgccccgtcaggcgtccttcttcccgccgccggtgccgaaccccttcgtgcagcagacgcagatcggctccgcgaggcgggtccagattgtccttcttgggattatcttgcttccaattcgtgtcttattggttgcattaattttattactggcatggccatttgctgcgatttcaacagcatgctgtcctgaaaagctgacccacccagtaactggttggaggaggaaaattacccaaccggttttgaagttcctgggtcgtgccttgttcttttcaatgggatttatagttactgtgaaaggaaaggtcgcaaatgctgtggaagccccaatttttgtggttgcccctcactcaacgttctttgatgggattgcctgtgtcatagctggcttaccgtctatggtgtctcgaaatgagaatgcacaggcccctctggttggcagactgttacgagctcttcaaccagtgctggtgtcccgtgttgatccagattctcgaaagaacacaataaatgaaataataaggcgtgccacttcaggaggggaatggccccagatgctagttttcccagaaggtacttgtactaatcgttcctgtttgattacttttaaaccaggggccttcattccaggagttcccgttcagccaatcctcctcagatacccaaacaagctggatactgtgacttggacgtggcaaggatatacattcattcagctttgtatgcttactttctgtcagcccttcacaagggtggaagttgagtttatgccagttcaagtaccaaatgaagaagaaagaaatgatccggtcctttttgccgatagagtccggaatttaatggctcaagctctggggattccagtaacagaccacacctatgaagactgcagattgatgatttcagcaggacagctaacattgcctatggaagctgggctggtggaatttactaaaattagccgaaaattgaaattagattgggatggtgttcgtaagcatttggatgaatatgcatctattgcgagttcctcaaaaggaggaagaattggaattgaagaattcgccaagtatttaaagttgcctgtttcagatgtcttgagacaactttttgcactctttgacaggaaccatgatggcagcattgacttccgagagtatgtgattggcctggctgtcttgtgcaacccttccaacacagaggagatcatccaggtggcatttaagctgtttgacgttgatgaggatggctacataacggaggaagagttctccaccattctacaggcttcccttggagtgcctgaccttgatgtttctggtctcttcaaggaaatagctcagggcgattctgtgtcgtacgaggaatttaaaagttttgccctgaagcatccagaatatgctaagatatttacaacatacttagacctccagacgagccatgtgttttcactgccaaaagaagctcaggcaactccctcattcacaagtaataaagtcagtcctgaaaatcgtgaagagagcgcctcagacaagaaggatgactga

SEQ ID NO: 54 - DNA, 807 bp, Unknown
  No homology
gattgtgtggaccctgggggagcagctagaggagatagggccctggccatgtcatctactgagataatgaagaagattcgtttcctgttgaagctgtaacaacctaccccagacacttcagtttaaaacaacaccaattcattttcttttcgttctagagagcaggagtctaaaaagtgtctgcaggcctgcgttcctcttttaggctgtggtctgtgttcctgccttttccagtttctgggctccgcctgcattccttgccttctggatccctcctccatctccaaacccaccagtgtagcatcttctctcctctctgacctctgcttccttcccgccttcttctctctcttgctcccaccctcctgcttccctcttataaggacccttgtggtgacattcggcccaagaagataatccaggataatctctcagtttccagattctcatcttcctcgcctcacaatgtccctttgctgtggcaggtcccactcacagttctgggatttagacgagcacaacttgagggggaccattcagccgacctcccggagctcagtatatctgaccatagcgcagggctgtgcttgcacttgtgcactaactcctgggggagacgtggggattgaatatttaatattctttagaatttgagacaggacatgatctaaatagagagagagagatgcttaacgaatcctggttctgtatgtctgaatgtgtaagttccggagttattgcacttgaggggaaaaaaattggtctaggaataaaaatgctgatttttttcaataacgtcctttactt

SEQ ID NO: 55 - DNA, 599 bp, Unknown
  No homology
ttggggtttatttttgttttttctgaaaaggaacacctttaagagcatggcactaaaacaacagactcacagaatggtcagatcagactcctgttacagctgagttgatgaaatcattctggaactcttagctccaacctactgaagtaaatcacaaatatcctcagagtttaacaagaaggatactccgttctgtagacacaggtagagtctaaggtccaccacttgttctttgttctcctctctgccccgtgatgacactctctaagagctctctaacactggctgctgtcacctcaccaaatttcccttcttctggctaattcctacactttttctcagtgttagcacatgcataactttttcttggatgttttatctgaacgcctgctcagactcttcctgccgtcactgtcatgttctaaatgacagctttttctaacggacaaatagtaaatatattgggctttgtcagtcttctgatcttcttcacgaccactcaattctgctgttgtcgcacaaagctactgtaggtgacacagagccacacgaacctggctgggttccataaaatttgtttacaacactaaaaaaaaaaa

SEQ ID NO: 56 - DNA, 2712 bp, Homo sapiens
agctacaacatattttcccactttaaataatatttaacatatgacaaaccccagacaaggcttttaatatgtataaagaactgcagtgttaggtggtttatttgcaaactgttttcagtgttgtccatttttatggcacctttaacaatattcttgtttccaaagtacaaaaaaaataggttaaataatctagccataactgaatgtcaagcaataaaacaaatgacttttgtgcatagacttaaaaaatacaaattttagacatctgcatgtaaatgcaatctcttgtttactgctttcttcaacttgagcaatcgattccttatttactattaacttaagaacttgtaacggcctgtaaacattttctctcttactcttctttcaaatttacctgtccctgcttttgagtcataatatttaatgttgttctgcacatctctatacagttaactttttggctttcattctgtatagataagaaaatgttatattataaacagcctactcagtgcaaatatttatctgtttatcaaatccacaatatgctgtataataccggttttactatataatctattttagacatagctgtttagaactagagtgtgctatttttgtgtttttctgatgtgtggtgctagacaagttacttttgtgaacaacaaaaattatcccttttattcctagacaataccacctttgggtcttgttaatttcactgagtataactatatatttgtatatatatacatatatatatatatctacctatgcccaactggcagctgtatcagagtgctggatttgggacatgcttttctctttaaatacataatatcattatataaattattctagagtgtatttaattaggataaaattacttccttagtatggatatttgacatctatagggtgaatttgtttataaatatggctatatggaaacttattagcatttactttatgtttgctacttggctttacagcatatctcctaagctgaaaaataatttgccaggccttcaagatcctaaagaaacttgtttaatggagtaatatacttttttttcttattaaggaattgtattactggcacctaacacagttgtattcttagctcctattatagataatgggcatttacataaaatatcctagatggcttgatggcagaataaacctttcccctcctacctgagtcatgagaaggatggagacgtcctctgccataacatgggccataaagcaaattcgacatgggatgttctgtttcagtatgacctcaaccagttccatgaactgagtgaaggaccttcattttcaaagttatttaataagtagcttaattaagcctttctacccattctcccaagatctattggcattattgaaaagcaaagtttatcaaatatctaactaaggatgtagttaaccttattaaatattgattagaattgttctgtaatattactgaatttgtaagatctttagcaaagatttttgagcaatttataaatgtagagcaaatgtttctgtttactgcactttttgtaactgaaggtgataaattctcaagccatgattattggcttccatgcactgcagtatttatccacaattctagacattttccatttttgtggaagagttgctgttaccttaattataaatgcaattgtgtggttaatgagagctaatgccagtagttaaccttttaaagtggattggctacagttgagggagaaatctcttttaatataaatcacatcattccttaactgcctctcttggaaagagattgaaacctttttttaaagcacgatttagcatcctaagcttcctgagggtagagattgtatctttttgcgtctgcacaatggctagcacatgtcagcatttgacaattgttaaatgataacaagtgtgccccaattaagacgtttttcctgggttgttttgttaaatttacaaagtaagccaagccttacggttaacattctcctctacaaccaagtattaaagccacatttaaaaagaccacatgaaatgctgattctaattgtgtgtaggtcttgaggattaagcacacaaatttcacaaacttctgtttgagtaaacaaactcagccttctgtaaatatacatgcaagtttggaaacagtaatactgtacctataaatatatgctgtctgttttgtgtacagtatgtaaaaactccttttctgccacactaaaaatgcaagccatttatgggaatcctaaaactagtattgaactaaaactttgctaatgatctttattagaggatcgtccaacttttcacttaccttgggttttcttttcaattcactcttacactagtctgcttatttccagctgtttattttattgagtcctgaatttaaaaaaaaaatattttgattcattttgtaaatacaagctgtacaaaaaagagagatttaatgttgtcttttaaatactccaattttcattctaatatgaatgttgttatattgtacttagaaactgtacctttaatattacattacctttattaaaagtgcattgaacacatcaattttagatgtgctttatgtactgttatcctataataaaacttcagcttctaatggaaaaaaaaaaaaaaaaaaaaaaaaaaaaaaaaaaaaaaaaaaaaaaaaaaaaaaggaaaaaaaaaaaaaaaaaa

SEQ ID NO: 57 - DNA, 7410 bp, Unknown
  Mitogen-activated protein kinase kinase kinase 1
atgggcagccaggccctgcaggagtggggacagagggaacccggccggtggcccgaccctgcagggaagaaggacgtgcggcgagaagcatcggattcggggagggccgggacctggccgaggacagccaaggaaaaactaaagatcgacggggacacccgcctcccttcctcgccccaacggtttctcagaggctgtggggacttgcaccagaaacccaagttggaactaattctttctttcggaaggtgcaactcccctcccgcgagctccgcggtgccgggccgagattgccgagaggaagcggcgcagcgctgccgccaaggctcctcctgtcgccggtgcggccgggactacctggcggcgcggcgcgggccgagcgaatgtagcccgcgagagaaaatggcggcggcggcggggaatcgcgcctcgtcgtcgggattcccgggcgccagggctacgagccctgaggcaggcggcggcggaggagccctcaaggcgagcagcgcgcccgcggctgccgcgggactgctgcgggaggcgggcagcgggggccgcgagcgggcggactggcggcggcggcagctgcgcaaagtgcggagtgtggagctggaccagctgcctgagcagccgctcttccttgccgcctcaccgccggcctcctcgacttccccgtcgccggagcccgcggacgcagcggggagtgggaccggcttccagcctgtggcggtgccgccgccccacggagccgcgagccgcggcggcgcccaccttaccgagtcggtggcggcgccggacagcggcgcctcgagtcccgcagcggccgagcccggggagaagcgggcgcccgccgccgagccgtctcctgcagcggcccccgccggtcgtgagatggagaataaagaaactctcaaagggttgcacaagatggatgatcgtccagaggaacgaatgatcagggagaaactgaaggcaacctgtatgccagcctggaagcacgaatggttggaaaggagaaataggcgagggcctgtggtggtaaaaccaatcccagttaaaggagatggatctgaaatgaatcacttagcagctgagtctccaggagaggtccaggcaagtgcggcttcaccagcttccaaaggccgacgcagtccttctcctggcaactccccatcaggtcgcacagtgaaatcagaatctccaggagtaaggagaaaaagagtttccccagtgccttttcagagtggcagaatcacaccaccccgaagagccccttcaccagatggcttctcaccatatagccctgaggaaacaaaccgccgtgttaacaaagtgatgcgggccagactgtacttactgcagcagatagggcctaactctttcctgattggaggagacagcccagacaataaataccgggtgtttattgggcctcagaactgcagctgtgcacgtggaacattctgtattcatctgctatttgtgatgctccgggtgtttcaactagaaccttcagacccaatgttatggagaaaaactttaaagaattttgaggttgagagtttgttccagaaatatcacagtaggcgtagctcaaggatcaaagctccatctcgtaacaccatccagaagtttgtttcacgcatgtcaaattctcatacattgtcatcatctagtacttctacgtctagttcagaaaacagcataaaggatgaagaggaacagatgtgtcctatttgcttgttgggcatgcttgatgaagaaagtcttacagtgtgtgaagacggctgcaggaacaagctgcaccaccactgcatgtcaatttgggcagaagagtgtagaagaaatagagaacctttaatatgtcccctttgtagatctaagtggagatctcatgatttctacagccacgagttgtcaagtcctgtggattccccttcttccctcagagctgcacagcagcaaaccgtacagcagcagcctttggctggatcacgaaggaatcaagagagcaattttaaccttactcattatggaactcagcaaatccctcctgcttacaaagatttagctgagccatggattcaggtgtttggaatggaactcgttggctgcttattttctagaaactggaatgtgagagagatggccctcaggcgtctttcccatgatgtcagtggggccctgctgttggcaaatggggagagcactggaaattctgggggcagcagtggaagcagcccgagtgggggagccaccagtgggtcttcccagaccagtatctcaggagatgtggtggaggcatgctgcagcgttctgtcaatggtctgtgctgaccctgtctacaaagtgtacgttgctgctttaaaaacattgagagccatgctggtatatactccttgccacagtttagcggaaagaatcaaacttcagagacttctccagccagttgtagacaccatcctagtcaaatgtgcagatgccaatagccgcacaagtcagctgtccatatcaacactgttggaactgtgcaaaggccaagcaggagagttggcagttggcagagaaatactaaaagctggatccattggtattggtggtgttgattatgtcttaaattgtattcttggaaaccaaactgaatcaaacaattggcaagaacttcttggccgcctttgtcttatagatagactgttgttggaatttcctgctgaattttatcctcatattgtcagtactgatgtttcacaagctgagcctgttgaaatcaggtataagaagctgctgtccctcttaacctttgctttgcagtccattgataattcccactcaatggttggcaaactttccagaaggatctacttgagttctgcaagaatggttactacagtaccccatgtgttttcaaaactgttagaaatgctgagtgtttccagttccactcacttcaccaggatgcgtcgccgtttgatggctattgcagatgaggtggaaattgccgaagccatccagttgggcgtagaagacactttggatggtcaacaggacagcttcttgcaggcatctgttcccaacaactatctggaaaccacagagaacagttcccctgagtgcacagtccatttagagaaaactggaaaaggattatgtgctacaaaattgagtgccagttcagaggacatttctgagagactggccagcatttcagtaggaccttctagttcaacaacaacaacaacaacaacaacagagcaaccaaagccaatggttcaaacaaaaggcagaccccacagtcagtgtttgaactcctctcctttatctcatcattcccaattaatgtttccagccttgtcaaccccttcttcttctaccccatctgtaccagctggcactgcaacagatgtctctaagcatagacttcagggattcattccctgcagaataccttctgcatctcctcaaacacagcgcaagttttctctacaattccacagaaactgtcctgaaaacaaagactcagataaactttccccagtctttactcagtcaagacccttgccctccagtaacatacacaggccaaagccatctagacctaccccaggtaatacaagtaaacagggagatccctcaaaaaatagcatgacacttgatctgaacagtagttccaaatgtgatgacagctttggctgtagcagcaatagtagtaatgctgttatacccagtgacgagacagtgttcaccccagtagaggagaaatgcagattagatgtcaatacagagctcaactccagtattgaggaccttcttgaagcatctatgccttcaagtgatacaacagtaacttttaagtcagaagttgctgtcctgtctcctgaaaaggctgaaaatgatgatacctacaaagatgatgtgaatcataatcaaaagtgcaaagagaagatggaagctgaagaagaagaagctttagcaattgccatggcaatgtcagcgtctcaggatgccctccccatagttcctcagctgcaggttgaaaatggagaagatatcatcattattcaacaggatacaccagagactctaccaggacataccaaagcaaaacaaccgtatagagaagacactgaatggctgaaaggtcaacagataggccttggagcattttcttcttgttatcaggctcaagatgtgggaactggaactttaatggctgttaaacaggtgacttatgtcagaaacacatcttctgagcaagaagaagtagtagaagcactaagagaagagataagaatgatgagccatctgaatcatccaaacatcattaggatgttgggagccacgtgtgagaagagcaattacaatctcttcattgaatggatggcagggggatcggtggctcatttgctgagtaaatatggagccttcaaagaatcagtagttattaactacactgaacagttactccgtggcctttcgtatctccatgaaaaccaaatcattcacagagatgtcaaaggtgccaatttgctaattgacagcactggtcagagactaagaattgcagattttggagctgcagccaggttggcatcaaaaggaactggtgcaggagagtttcagggacaattactggggacaattgcatttatggcacctgaggtactaagaggtcaacagtatggaaggagctgtgatgtatggagtgttggctgtgctattatagaaatggcttgtgcaaaaccaccatggaatgcagaaaaacactccaatcatcttgctttgatatttaagattgctagtgcaactactgctccatcgatcccttcacatttgtctcctggtttacgagatgtggctcttcgttgtttagaacttcaacctcaggacagacctccatcaagagagctactgaagcatccagtctttcgtactacatggtagccaattatgcagatcaactacagtagaaacaggatgctcaacaagagaaaaaaaacttgtggggaaccacattgatattctactggccatgatgccactgaacagctatgaacgaggccagtggggaacccttacctaagtatgtgattgacaaatcatgatctgtacctaagctcagtatgcaaaagcccaaactagtgcagaaactgtaaactgtgcctttcaaagaactggccctaggtgaacaggaaaacaatgaagtttgcatgactaaattgcagaagcataattttatttttttggagcactttttcagcaatattagcggctgaggggctcaggatctattttaatatttcaattattcttccatttcatatagtgatcacaagcagggggttctgcaattccgttcaaattttttgtcactggctataaaatcagtatctgcctcttttaggtcagagtatgctatgagtagcaatacatacatatatttttaaaagttgatacttctttatgacccacagttgacctttattttcttaaataccagggcagttgtggctcattgtgcattttactgttggcccattcatttcgtttttggaaattatggttttgtattttcatgtttatttacattcatttttgtttattcagggaaagctgatctttttttcaaaccagaaaaaaaaaatgaactagatatgaagtagagttcattaaatatcttgctattgtcagagtttttaaaatatagacttaattttgtttttttaaattggaatacaataaagtactacctacatttgagtcagtcaccactcttattgtgcaggttaagtacaagttaactaaaaataaactgtcctctctggtgcaactcacaaccaagatcaagattaccttaaaatttatttgaattttttagatgttttggttgtcaaactgtaggaaacttcacaacatttaagtcttactctgtatgtaacaatccatcattcaccttcactactggtagtaacatagagctgccattttccttttaccatgcatcatctctttacagtaggcctggcagatcattttttaaaaagattattcaactaccaatcagtaatgtttttaaacagtacatttgctttgaacttggaaaatgtgttcagaaagaaaaatggaattgaatttcatttatacactaattccttggattttgcacagttacctaacggttttagtctggagttaaattcagatgcatggaatcctgaaggaaaatggtagctttttaatctttttgtgtgtgtgtgagtcttttaaatcaagtactgattaactattaagtacaactttgagattttagttttaactcttcagaagccagtgtgaaatagaattggttattctcaaagactcaggataaactaaataagctatatatagagtacatttaaaatgtacaacacaaattggaaataaaataagttacaagataagtttacagggatatattgcttacaatttttaaaaggcagtttgttttttatgtgaatatgtttcttagtgaaattttacattcctttgttttggaagattggcgatatttgaagagttaaaaatagtacagaaatgtgaagtttggtatctctaaatgtgttgtacttgactttcttttttattttgtttttttttttttttgactacttagaattttcacaattctaataagattgtttccaagtctctcatgtgcaagctttaaaggatgcactcttgccattttatgtactggaagatcattggtcagatgaatactgtgtctgacaaaaatgtaaactgtataaactgaggaacctcagctaatcagtattactttgtagatcaccatgcccaccacatttcaaactcaaactatctgtagatttcaaaatccattgtgtttgagtttgtttgcagttccctcagcttgctggtaattgtggtgttttgttttttgttttgttttcaatgcaaatgtgatgtaatattcttattttctttggatcaaagctggactggaaattgtatcgtgtaattatttttgtgttcttaatgttatttggtactcaagttgtaaataacgtctactactgtttattccagtttctactacctcaggtgtcctatagatttttcttctaccaaagttcactttcacaatgaaattatatttgctgtgtgactatgattcctaagatttccagggcttaagggctaacttctattagcaccttactgtgtaagcaaatgttacaaaaaaaaaaaaaaaaaatctctgggttaagaaaatttggcttaaatgtatcctttgttattttaaatatattgagatattttaattaaaatttttaccccattgaaccgattttatagtatttgtacctattttggtgtttttgtctttatagtaaataaaagtttttgaac

SEQ ID NO: 58 - DNA, 4941 bp, Unknown
  Mitogen-activated protein kinase kinase kinase 1
  exon (1)..(4941)
atgggcagccaggccctgcaggagtggggacagagggaacccggccggtggcccgaccctgcagggaagaaggacgtgcggcgagaagcatcggattcggggagggccgggacctggccgaggacagccaaggaaaaactaaagatcgacggggacacccgcctcccttcctcgccccaacggtttctcagaggctgtggggacttgcaccagaaacccaagttggaactaattctttctttcggaaggtgcaactcccctcccgcgagctccgcggtgccgggccgagattgccgagaggaagcggcgcagcgctgccgccaaggctcctcctgtcgccggtgcggccgggactacctggcggcgcggcgcgggccgagcgaatgtagcccgcgagagaaaatggcggcggcggcggggaatcgcgcctcgtcgtcgggattcccgggcgccagggctacgagccctgaggcaggcggcggcggaggagccctcaaggcgagcagcgcgcccgcggctgccgcgggactgctgcgggaggcgggcagcgggggccgcgagcgggcggactggcggcggcggcagctgcgcaaagtgcggagtgtggagctggaccagctgcctgagcagccgctcttccttgccgcctcaccgccggcctcctcgacttccccgtcgccggagcccgcggacgcagcggggagtgggaccggcttccagcctgtggcggtgccgccgccccacggagccgcgagccgcggcggcgcccaccttaccgagtcggtggcggcgccggacagcggcgcctcgagtcccgcagcggccgagcccggggagaagcgggcgcccgccgccgagccgtctcctgcagcggcccccgccggtcgtgagatggagaataaagaaactctcaaagggttgcacaagatggatgatcgtccagaggaacgaatgatcagggagaaactgaaggcaacctgtatgccagcctggaagcacgaatggttggaaaggagaaataggcgagggcctgtggtggtaaaaccaatcccagttaaaggagatggatctgaaatgaatcacttagcagctgagtctccaggagaggtccaggcaagtgcggcttcaccagcttccaaaggccgacgcagtccttctcctggcaactccccatcaggtcgcacagtgaaatcagaatctccaggagtaaggagaaaaagagtttccccagtgccttttcagagtggcagaatcacaccaccccgaagagccccttcaccagatggcttctcaccatatagccctgaggaaacaaaccgccgtgttaacaaagtgatgcgggccagactgtacttactgcagcagatagggcctaactctttcctgattggaggagacagcccagacaataaataccgggtgtttattgggcctcagaactgcagctgtgcacgtggaacattctgtattcatctgctatttgtgatgctccgggtgtttcaactagaaccttcagacccaatgttatggagaaaaactttaaagaattttgaggttgagagtttgttccagaaatatcacagtaggcgtagctcaaggatcaaagctccatctcgtaacaccatccagaagtttgtttcacgcatgtcaaattctcatacattgtcatcatctagtacttctacgtctagttcagaaaacagcataaaggatgaagaggaacagatgtgtcctatttgcttgttgggcatgcttgatgaagaaagtcttacagtgtgtgaagacggctgcaggaacaagctgcaccaccactgcatgtcaatttgggcagaagagtgtagaagaaatagagaacctttaatatgtcccctttgtagatctaagtggagatctcatgatttctacagccacgagttgtcaagtcctgtggattccccttcttccctcagagctgcacagcagcaaaccgtacagcagcagcctttggctggatcacgaaggaatcaagagagcaattttaaccttactcattatggaactcagcaaatccctcctgcttacaaagatttagctgagccatggattcaggtgtttggaatggaactcgttggctgcttattttctagaaactggaatgtgagagagatggccctcaggcgtctttcccatgatgtcagtggggccctgctgttggcaaatggggagagcactggaaattctgggggcagcagtggaagcagcccgagtgggggagccaccagtgggtcttcccagaccagtatctcaggagatgtggtggaggcatgctgcagcgttctgtcaatggtctgtgctgaccctgtctacaaagtgtacgttgctgctttaaaaacattgagagccatgctggtatatactccttgccacagtttagcggaaagaatcaaacttcagagacttctccagccagttgtagacaccatcctagtcaaatgtgcagatgccaatagccgcacaagtcagctgtccatatcaacactgttggaactgtgcaaaggccaagcaggagagttggcagttggcagagaaatactaaaagctggatccattggtattggtggtgttgattatgtcttaaattgtattcttggaaaccaaactgaatcaaacaattggcaagaacttcttggccgcctttgtcttatagatagactgttgttggaatttcctgctgaattttatcctcatattgtcagtactgatgtttcacaagctgagcctgttgaaatcaggtataagaagctgctgtccctcttaacctttgctttgcagtccattgataattcccactcaatggttggcaaactttccagaaggatctacttgagttctgcaagaatggttactacagtaccccatgtgttttcaaaactgttagaaatgctgagtgtttccagttccactcacttcaccaggatgcgtcgccgtttgatggctattgcagatgaggtggaaattgccgaagccatccagttgggcgtagaagacactttggatggtcaacaggacagcttcttgcaggcatctgttcccaacaactatctggaaaccacagagaacagttcccctgagtgcacagtccatttagagaaaactggaaaaggattatgtgctacaaaattgagtgccagttcagaggacatttctgagagactggccagcatttcagtaggaccttctagttcaacaacaacaacaacaacaacaacagagcaaccaaagccaatggttcaaacaaaaggcagaccccacagtcagtgtttgaactcctctcctttatctcatcattcccaattaatgtttccagccttgtcaaccccttcttcttctaccccatctgtaccagctggcactgcaacagatgtctctaagcatagacttcagggattcattccctgcagaataccttctgcatctcctcaaacacagcgcaagttttctctacaattccacagaaactgtcctgaaaacaaagactcagataaactttccccagtctttactcagtcaagacccttgccctccagtaacatacacaggccaaagccatctagacctaccccaggtaatacaagtaaacagggagatccctcaaaaaatagcatgacacttgatctgaacagtagttccaaatgtgatgacagctttggctgtagcagcaatagtagtaatgctgttatacccagtgacgagacagtgttcaccccagtagaggagaaatgcagattagatgtcaatacagagctcaactccagtattgaggaccttcttgaagcatctatgccttcaagtgatacaacagtaacttttaagtcagaagttgctgtcctgtctcctgaaaaggctgaaaatgatgatacctacaaagatgatgtgaatcataatcaaaagtgcaaagagaagatggaagctgaagaagaagaagctttagcaattgccatggcaatgtcagcgtctcaggatgccctccccatagttcctcagctgcaggttgaaaatggagaagatatcatcattattcaacaggatacaccagagactctaccaggacataccaaagcaaaacaaccgtatagagaagacactgaatggctgaaaggtcaacagataggccttggagcattttcttcttgttatcaggctcaagatgtgggaactggaactttaatggctgttaaacaggtgacttatgtcagaaacacatcttctgagcaagaagaagtagtagaagcactaagagaagagataagaatgatgagccatctgaatcatccaaacatcattaggatgttgggagccacgtgtgagaagagcaattacaatctcttcattgaatggatggcagggggatcggtggctcatttgctgagtaaatatggagccttcaaagaatcagtagttattaactacactgaacagttactccgtggcctttcgtatctccatgaaaaccaaatcattcacagagatgtcaaaggtgccaatttgctaattgacagcactggtcagagactaagaattgcagattttggagctgcagccaggttggcatcaaaaggaactggtgcaggagagtttcagggacaattactggggacaattgcatttatggcacctgaggtactaagaggtcaacagtatggaaggagctgtgatgtatggagtgttggctgtgctattatagaaatggcttgtgcaaaaccaccatggaatgcagaaaaacactccaatcatcttgctttgatatttaagattgctagtgcaactactgctccatcgatcccttcacatttgtctcctggtttacgagatgtggctcttcgttgtttagaacttcaacctcaggacagacctccatcaagagagctactgaagcatccagtctttcgtactacatggtag

SEQ ID NO: 59 - DNA, 8304 bp, Homo sapiens
  misc_feature (2320)..(2320): n is a, c, g, or t
  misc_feature (2383)..(2383): n is a, c, g, or t
  misc_feature (2385)..(2385): n is a, c, g, or t
  misc_feature (2395)..(2395): n is a, c, g, or t
  misc_feature (2402)..(2402): n is a, c, g, or t
  misc_feature (2405)..(2405): n is a, c, g, or t
  misc_feature (2409)..(2409): n is a, c, g, or t
  misc_feature (2415)..(2415): n is a, c, g, or t
  misc_feature (2417)..(2417): n is a, c, g, or t
  misc_feature (2434)..(2434): n is a, c, g, or t
  misc_feature (2453)..(2453): n is a, c, g, or t
  misc_feature (2460)..(2460): n is a, c, g, or t
  misc_feature (2464)..(2464): n is a, c, g, or t
  misc_feature (2469)..(2469): n is a, c, g, or t
  misc_feature (2472)..(2472): n is a, c, g, or t
  misc_feature (2480)..(2482): n is a, c, g, or t
  misc_feature (2484)..(2484): n is a, c, g, or t
  misc_feature (2487)..(2487): n is a, c, g, or t
  misc_feature (2491)..(2491): n is a, c, g, or t
  misc_feature (2494)..(2494): n is a, c, g, or t
  misc_feature (2497)..(2497): n is a, c, g, or t
  misc_feature (2523)..(2523): n is a, c, g, or t
  misc_feature (2536)..(2538): n is a, c, g, or t
  misc_feature (2542)..(2542): n is a, c, g, or t
  misc_feature (2544)..(2544): n is a, c, g, or t
  misc_feature (2546)..(2546): n is a, c, g, or t
  misc_feature (2556)..(2556): n is a, c, g, or t
  misc_feature (2595)..(2595): n is a, c, g, or t
  misc_feature (2597)..(2597): n is a, c, g, or t
  misc_feature (2603)..(2603): n is a, c, g, or t
  misc_feature (2623)..(2623): n is a, c, g, or t
  misc_feature (3247)..(3247): n is a, c, g, or t
  misc_feature (3277)..(3277): n is a, c, g, or t
  misc_feature (3290)..(3290): n is a, c, g, or t
  misc_feature (3297)..(3297): n is a, c, g, or t
  misc_feature (3299)..(3300): n is a, c, g, or t
  misc_feature (3302)..(3302): n is a, c, g, or t
  misc_feature (3308)..(3308): n is a, c, g, or t
  misc_feature (3311)..(3311): n is a, c, g, or t
  misc_feature (3320)..(3320): n is a, c, g, or t
  misc_feature (3334)..(3334): n is a, c, g, or t
  misc_feature (4168)..(4168): n is a, c, g, or t
  misc_feature (4170)..(4170): n is a, c, g, or t
  misc_feature (4172)..(4172): n is a, c, g, or t
  misc_feature (4174)..(4174): n is a, c, g, or t
  misc_feature (4181)..(4182): n is a, c, g, or t
  misc_feature (4189)..(4189): n is a, c, g, or t
  misc_feature (4192)..(4192): n is a, c, g, or t
  misc_feature (4196)..(4196): n is a, c, g, or t
  misc_feature (4200)..(4200): n is a, c, g, or t
  misc_feature (4205)..(4205): n is a, c, g, or t
  misc_feature (4342)..(4342): n is a, c, g, or t
  misc_feature (4345)..(4346): n is a, c, g, or t
  misc_feature (4348)..(4348): n is a, c, g, or t
  misc_feature (4352)..(4352): n is a, c, g, or t
  misc_feature (4366)..(4366): n is a, c, g, or t
  misc_feature (4368)..(4368): n is a, c, g, or t
  misc_feature (4372)..(4372): n is a, c, g, or t
  misc_feature (4376)..(4376): n is a, c, g, or t
  misc_feature (4410)..(4410): n is a, c, g, or t
  misc_feature (4412)..(4412): n is a, c, g, or t
  misc_feature (4416)..(4416): n is a, c, g, or t
  misc_feature (4423)..(4423): n is a, c, g, or t
  misc_feature (4425)..(4425): n is a, c, g, or t
  misc_feature (4430)..(4432): n is a, c, g, or t
  misc_feature (4439)..(4439): n is a, c, g, or t
  misc_feature (4442)..(4443): n is a, c, g, or t
  misc_feature (4449)..(4449): n is a, c, g, or t
  misc_feature (4451)..(4451): n is a, c, g, or t
  misc_feature (4464)..(4464): n is a, c, g, or t
  misc_feature (4475)..(4475): n is a, c, g, or t
  misc_feature (4478)..(4479): n is a, c, g, or t
  misc_feature (4491)..(4491): n is a, c, g, or t
  misc_feature (4493)..(4493): n is a, c, g, or t
  misc_feature (4496)..(4496): n is a, c, g, or t
  misc_feature (4515)..(4515): n is a, c, g, or t
  misc_feature (4522)..(4522): n is a, c, g, or t
  misc_feature (4527)..(4527): n is a, c, g, or t
  misc_feature (4529)..(4529): n is a, c, g, or t
  misc_feature (4532)..(4532): n is a, c, g, or t
  misc_feature (4539)..(4539): n is a, c, g, or t
  misc_feature (4545)..(4545): n is a, c, g, or t
  misc_feature (4571)..(4571): n is a, c, g, or t
  misc_feature (4624)..(4624): n is a, c, g, or t
  misc_feature (4634)..(4634): n is a, c, g, or t
  misc_feature (4662)..(4662): n is a, c, g, or t
  misc_feature (4739)..(4739): n is a, c, g, or t
  misc_feature (4766)..(4766): n is a, c, g, or t
  misc_feature (5186)..(5186): n is a, c, g, or t
  misc_feature (6273)..(6273): n is a, c, g, or t
  misc_feature (6458)..(6458): n is a, c, g, or t
  misc_feature (6465)..(6465): n is a, c, g, or t
  misc_feature (6499)..(6499): n is a, c, g, or t
  misc_feature (6508)..(6508): n is a, c, g, or t
  misc_feature (6520)..(6520): n is a, c, g, or t
  misc_feature (6532)..(6532): n is a, c, g, or t
  misc_feature (7166)..(7166): n is a, c, g, or t
  misc_feature (7171)..(7171): n is a, c, g, or t
  misc_feature (7177)..(7178): n is a, c, g, or t
  misc_feature (7185)..(7185): n is a, c, g, or t
  misc_feature (7194)..(7194): n is a, c, g, or t
  misc_feature (7209)..(7209): n is a, c, g, or t
  misc_feature (7216)..(7217): n is a, c, g, or t
  misc_feature (7227)..(7227): n is a, c, g, or t
  misc_feature (7246)..(7246): n is a, c, g, or t
  misc_feature (7259)..(7260): n is a, c, g, or t
  misc_feature (7268)..(7268): n is a, c, g, or t
  misc_feature (7286)..(7287): n is a, c, g, or t
  misc_feature (7292)..(7292): n is a, c, g, or t
  misc_feature (7294)..(7294): n is a, c, g, or t
  misc_feature (7303)..(7303): n is a, c, g, or t
  misc_feature (7365)..(7365): n is a, c, g, or t
tctagacgtgtcctatagctcaaaaaatcagcgctatggaccacagcgcctaacagagtaaaataatacactgtgcagtttggccactaacagcaagagtgggaaggggcgaagaggaaccttgattgcccgacaccagggccacctgaaaagtcatcttgacacttcagtctttccattttgagatcggaagctttaaggaccattaaatcgctgccgctgccacaccaggcccgacggagcagaaaggctgcgctcacctgcggaagcgaccgggtgcacacctgccgggtggcgaggcccgcaccgtcacaccccgccccggcttacctgcccttcggtgatttttagcgtcaacttccatcccttcccacccatctggatccaaccaagcgcaagggcgggggagggagaagctagtgtcgcgaggaaaagcatccccgcaacccaccgcaggctttctctccttcctccccattccacacaagaggcaaagccacaccgcctctcctaaccctcgtctccaatgcaaggcctgaaatacttagaaaaaataataactgtttttaaggaaaagtaacatccccgctcccttccgcccctcaccttcacgaaagcaatcggggttgtggtaccttcgatatctaacaggatcacggtgacttcggcggggaccgaaagcacgaccatttccctaccggatgctacgggactcggcctgctgttggggagggcggagggcggcgccggctgcggctgcggcccccggtaccgtcttgggcttccggcggccccgcgcgatctcggagccagcgaccaagtgcagcccgccgcgcgtggggagaggacacttctgcacacctggaactggaaaaggcggccgcccaggagccctgaactcgtgagcaggacggggcaggagcccgagaccacgtgggcaggaaaaggggcggcccttgacgggttcggcggggcggggagggtgaaggcgccagcgccgattggccgccgtcaggcctcgaactggatccgtcaaaatgggcctcgcgtgggcgggaacaaagaagcgaacgcgggagcagggtgcgcgagagcgcgccctccgcagacaggttgagcgagcgggagaggcccggggcacgtgcagaaaggagccccgcgagtggcgcgccggggatgtgagtgccccttgccctctactgaatccagccccctccccgcccaccgcctccgcctttgcatagatacagtcatctggccagcccccgcccctcctcccggcgtcagcccgccagaggccgcgcggggcccgggcttcggccgatcagcccgggaggccccgccgcgcccccttggcccgcgcgcccgtggtcacagtggaagaggcgcccgcgctgcgctgcccggaggagccgtcgcgcgcccgcttcctgttcggctggttcctgccagctcgaggacaaaacacgcgtgcgcgcggcgggcgagcgcgctcgccgcctcagtcgccagcgccgggcgcagtccgcctttttccggagcagactggccgcggtgctagtcggtagcagcggccgccgcagcggctccgcactggcgaaccgagggcagaaaaaggcggggttgacggctttttggtaggagtgggctggaccggacgccagagacaaaggctcccaaggcaagagggactgtggccctgcgtcggctctgctcggaactgctgaccccaggaatttacgccccttcgtttttctcttctgattcttctcttctcccaagcccgcgtcccctcacgcgtggcctctctccttgccgggagggccgcgatggaggtcccgcccaggctttcccatgtgccgccgccattgttcccctccgctcccgctactttagcctcccgcagcctctcccattggcggccgcggccgccgcggcagctagccccgctcctcccttcgctcgctcccagctccgcccggcagggggcgcgccgggcccagcgccacgtcaccgcccagcagccctcccgattggcgggcggggcggctataaagggagggcgcaggcggcgcccggatctcttccgccgccattttaaatccagctccatacaacgctccgccgccgctgctgccgcgacccggactgcgcgccagcacccccctgccgacagctccgtcactatggaggatatgaacgagtacagcaatatagaggaattcgcagagggatccaagatcaacgcgagcaagaatcagcaggatgacgggtacgcacgcttcttcccccgctccccctcccccagcgcgccgcacgnccttcgttcctcgtgagccgcgcgctgcccccattctttctcagagtcgattccccgcgtgcntnctgggccccnactagantgnaggnaagagnanagtaagagatcgagggngtgactggagagacccggnaagagtngggnaaggncgnaggggttnnngnagnaggncgncgncgtctgtgtcccgagcgcgcaggcgncgcgtgggacccnnngggnangngccggcctcnccagcgctgcacgctgcagctgccgccgcctcttcattntntctctnttaccactctgcgcggtttncctgggaagagttttagaggactgagttggggcacaagcaggcgactggtacccagattcacaaaacgtgttatgattgatgagttctctgggtggaacgttggcttgacagctgagaacgaagatggacctaagtaagataagatgtgagggattcatctaggaagttgtgccttctacctaaaggaatctgggcagaacctttactgtattttattggtctcttttgagctttgctttatgtagtgcggacagtgagctgtccgctggtttgagtaacttcgttgggatattgggatttttgtgtgacatagattaaatgtaaacatgaattaaattgcctacacttagggggtaaatgtccctgtttttatttcacgatttaattccagaactgaaggatcatttgagttattgttaattttttttaaaaacacttttatttctagtaaaatgtttattggaggcttgagctgggatacaagcaaaaaagatctgacagagtacttgtctcgatttggggaagttgtagactgcacaattaaaacagatccagtcactgggagatcaagaggatttggatttgtgcttttcaaagatgctgctagtgttgataaggtaggnactatgttttgcattgtgctgcttcttgtngtgttttgcaaanttttctngnngntatatngtncttgtcaanattaaataaatctntctttgtaggttttggaactgaaagaacacaaactggatggcaaattgatagatcccaaaagggccaaagctttaaaagggaaagaacctcccaaaaaggtttttgtgggtggattgagcccggatacttctgaagaacaaattaaagaatattttggagcctttggagaggtgtgtgattatgtttacacatgttaagcttgatgtgtttataaaatgttcaatccttgtccgatttatgcagggcagattcatgtttcctgtaagagtagaattaaatgactgctcaagtcgcttccagtgactgtaccttgatttcattgctgctctgatggaaacccaactatctaatttagctaaaacatgggcacttaaatgtggtcagtgtttggacttgttaactagtggcatctttgggtacaaaataatattaatttctctcagtgcttcaaatatacaacaaatcactgtaggctgatgttgatcataaagcagtgatgtctgtatagaagtcacccgataagaataacatgtttaagttgaagcctgaaaaggcctttggcattctgacactgtaacgttttacaattatgggatgacgttgagtgtgcatctcgatttcagattgaaaatattgaacttcccatggatacaaaaacaaatgaaagaagaggattttgttttatcacatatactgatgaagagccagtaaaaaaattgttagaaagcagataccatcaaattggttctgggaaggtaaagccatttaagcactttaaatgaaaatttaaataattgaaataatttcttgatgtggagaaaaataaaatgatntnantntagaacnncggtaanaantatncttncatgntttttgtttatagtgtgaaatcaaagttgcacaacccaaagaggtatataggcagcaacagcaacaacaaaaaggtggaagaggtgctgcagctggtggacgaggtggtacgaggggtcgtggccgaggtgagactnaanncntganatatgactccgtgntntatntaangctgtatactgctgaatatgagtagtcctgtacnanagcnaaaactntnaaacnnnaaaaccnatnnccagcngnaggggggactgtncagcttagtgnagnntgtgtgtggtgntnttntgttgtgagctcactggtntcaaaanactgntnaanagtgtgnccactntgacaattagtgtcatcactgatagnaaaagtgtaccattacatgatacaccgtggtgtgataggttctcttgggcagnagtccttgtnttaaacagaacagtgtacctgtcttcgnctttaatggaaaattgaatgattttccattaagtttaggaagtttgatactggcacaattggactttctgcctcctnttttataacagctggaaaaatagtttntcaagcagatagcaatatatatgtccattctgccctttaagatttgcagagtgagagacaagaacgcatcattttatgttagaattgggggtcagaagttgtttcctaacaatcattgtgcattgtttcaggtcagggccaaaactggaaccaaggatttaataactattatgatcaaggatatggaaattacaatagtgcctatggtggtgatcaaaactatagtggctatggcggatatgattatactgggtataactatgggaactatggatatggacagggatatgcagactacagtggtaagaatatttaacttaattttataaagcagtggtattaaaattcattgttaacatacaatcctgttctgaaattgtgtgtatgggctttccattaaagtgttcggagttaagtgtntgaggcatgttacaatcataggatgattatactaacatagactggtggttataaatgaactaggatgtatgatttatgagtagcatctaatgggtgctaaaatatcttaatactttttatttagcatgcaaagcatttgtagatttaatagtttgtgtttgtaaagaaagttttgtagaaaactatcttaatgagaattctgtgttttcaaaataggccaacagagcacttatggcaaggcatctcgagggggtggcaatcaccaaaacaattaccagccatactaaaggagaacattggagaaaacaggtgtgtataagagtacaggaaaacagtagaaatgtctaatttaatttaaagatcaatagacaaatgaaacgtaaaaacaaaatactatgtagcctgtttttactaaattgttgattttttaattgctttatgagcctgttttgcctaaagtgtctatagatctttaactttaaagtcttatctcactttctttagtattgcagaaaaacttaagagtttttctgtttgcttttgtgtaccaggtggtctagaggaataattaaacattttagaactattaacaggtaaagtactgaaatgggtacaacttaaggaaaacaagaatgttgtcttctaactctgacattataccttgtttgtacccgccagcgggaacttcattgcaggccgtgtgtcaccctgaccacgtctatctctgggggtcgcacgttgcgggcagagcgcaaggcatacaccagaaaacgctgtcctgtggtatggtctcttccaacttcatgtaccagcgtaaagattaaagtggaaaacttcagactttggcttcatttttaatctttttggagattaagtgtctaaacttaacttaaatggttttttacaggagttaaagtacataaatgcctttttacagcttaatcattttggtcttctgtttagtgttgtatttcaattgtggagcctcattttaagtgttcattcttttaagatttaatgcttgctttttctttttatagctaatagtgaaatctacaaaccaaaacaagaacttttaaatctgggntataaattaaaggtcatatgcacagatcaatttatgttcttgtaataaacttattagaaattgggtgtttgtgatagcattttacttggggttactagagatgcttctagtagaccttaatctagcatagttgaacctctgaatatgggaaggttgagtttattgactacccaaactgtattttnccaatanatatgcatatgatctttaattattgaagaaaatnaagtgaggncttaaaacaatncatgaaagtggncctttaaaagcttgtcagagttgcacaaatctaactggtattttgtttttgtttttaggaggagatgttaaagtaacccatcttgcaggacgacattgaagattggtcttctgttgatctaagatgattattttgtaaaagactttctagtgtacaagacaccattgtgtccaactgtatatagctgccaattagttttctttgtttttactttgtcctttgctatctgtgttatgactcaatgtggatttgtttatacacattttatttgtatcatttcatgttaaacctcaaataaatgcttccttatgtgattgcttttctgcgtcaggtactacatagctctgtaaaaaatgtaatttaaaataagcaataattaaggcacagttgattttgtagagtattggtccatacagagaaactgtggtcctttataaatagccagccagcgtcaccctcttctccaatttgtaggtgtattttatgctcttaaggcttcatcttctccctgtaactgagatttctaccacacctttgaacaatgttctttcccttctggttatctgaagactgtcctgaaagaagacataagtgttgtgattagtagaagctttctagtagaccatatttcttntggantgtaannaaattgnttagtagcncctttttactttgtncctgtcnntggaaagccnatttttgaattgctgattnctttggctttaannagtggtcncctagaaaaagcttgtanncatancncatgagtantctgataaaagttcagatacaaaggagcactgtaaactgtagagctatgttaagagcattgnagtagtacaacccaagatttgtagaagtatgagttggcgaaattaaatagtgcaaatagatttagttgtgttttctcagagccgccacaagattgaacaaaatgttttctgtttgggcatcctgaggaagttgtattagctgttaatgctctgtgagtttagaaaaagtcttgatagtaaaatctagtttttgacacagtgcatgaactaagtagttaaatatttacatattcagaaaggaatagtggaaaaggtatcttggttatgacaaagtcattacaaatgtgactaagtcattacaaatgtgactgagtcattacagtggaccctctgggtgcattgaaaagaatccgttttatatccaggtttcagaggacctggaataataataagctttggattttgcattcagtgtagttggattttgggaccttggcctcagtgttatttactgggattggcatacgtgttcacaggcagagtagttgatctcacacaacgggtgatctcacaaaactggtaagtttcttatgctcatgagccctccctttttttttttaatttggtgcctgcaactttcttaacaatgattctacttcctgggctatcacattataatgctcttggcctcttttttgctgctgttttgctattcttaaacttaggccaagtaccaatgttggctgttagaagggattctgttcattcaacatgcaactttagggaatggaagtaagttcatttttaagttgtgttgtcagtaggtgcggtgtctagggtagtgaatcctgtaagttcaaatttatgattaggtgacgagttgacattgagattgtccttttccctgatcaaaaaatgaataaagcctttttaaacaaaatccaaacttttaatcaagtcttgatatgtatgactgagaaaaaatacactacatctaga

SEQ ID NO: 60 - protein, 420 aa, Homo sapiens
MEVPPRLSHVPPPLFPSAPATLASRSLSHWRPRPPRQLAPLLPSLAPSSARQGARRAQRHVTAQQPSRLAGGAAIKGGRRRRPDLFRRHFKSSSIQRSAAAAAATRTARQHPPADSSVTMEDMNEYSNIEEFAEGSKINASKNQQDDGKMFIGGLSWDTSKKDLTEYLSRFGEVVDCTIKTDPVTGRSRGFGFVLFKDAASVDKVLELKEHKLDGKLIDPKRAKALKGKEPPKKVFVGGLSPDTSEEQIKEYFGAFGEIENIELPMDTKTNERRGFCFITYTDEEPVKKLLESRYHQIGSGKCEIKVAQPKEVYRQQQQQQKGGRGAAAGGRGGTRGRGRGQGQNWNQGFNNYYDQGYGNYNSAYGGDQNYSGYGGYDYTGYNYGNYGYGQGYADYSGQQSTYGKASRGGGNHQNNYQPY

SEQ ID NO: 61 - protein, 301 aa, Homo sapiens
MEDMNEYSNIEEFAEGSKINASKNQQDDGKMFIGGLSWDTSKKDLTEYLSRFGEVVDCTIKTDPVTGRSRGFGFVLFKDAASVDKVLELKEHKLDGKLIDPKRAKALKGKEPPKKVFVGGLSPDTSEEQIKEYFGAFGEIENIELPMDTKTNERRGFCFITYTDEEPVKKLLESRYHQIGSGKCEIKVAQPKEVYRQQQQQQKGGRGAAAGGRGGTRGRGRGQGQNWNQGFNNYYDQGYGNYNSAYGGDQNYSGYGGYDYTGYNYGNYGYGQGYADYSGQQSTYGKASRGGGNHQNNYQPY

SEQ ID NO: 62 - DNA, 909 bp, Unknown
  No homology
aagggacgaagcccctgtagccaaccctggccaccggtgtatttgagccatgagttaagagaacaaccttctatgcatgtagagactgccccaacccatgttcatccacaactgtccagagttccacagccatggatgtgcccacagactgcagggagaaggagtcatagcacatacagtgagtgaacagacatgatacagagaagagacatgttatgcacatttgacacgagtcctcttgcgtttcttggtctagatgaattgctaatggctatcacgatctgcgtccaggcagctgagctcaggggaaggcagctgacccctctcccacaggcccccagacccggtgtacccagaatcaggcagggcagaggcaggacacaaaggtaatgaaggacataggttcagggatttgttttcaggctgttgttgttgtttacattttgcatttttaaatttgctctctttttaatttgtttagagggaaagctatgtgtttttaattttttaattttcttgtttgttttggtttgtgatatctgtggagggagttttaagtagtgagctaatggaccttatctgttggcttagaggcctaataataatcagaccattttattccttgtttgggtgttatactttccaagtcctttcctctgaatcagtggtaatgaatatatttacataatcccttagatttgcttagtgcttttgtgattttcaaagcacttccatgagcattatcccttgcattcccttgacaagtatttatggaaagtctgctgtgtgccaaccatagtgttaggcatggggcatctaaaacaagtaagcctgggaccctgccctcacaaaacgaaaaaatctaaccaaagaggcaggtttgtaaacaaatgattataataaacacaa

SEQ ID NO: 63 - DNA, 681 bp, Unknown
  No homology
  misc_feature (590)..(590): n is a, c, g, or t
gaggcatttaaaattcatgtatgatactcttataatcataactgctgctaatgcttgattatatactcagggacaatgtataacgtaagattacaaatttgttctcaccaactcccttttggatttcattaagaaagaaaaactcctggtcagagataatgtataaatcagagatgtaaatggctagttgtctatagcattaaatgaagggaaaactgataattaggcagttaatttggtcaattaaacaaccatgtctgcatctaggggagcctggcttatttgattgatttcctactagtctttgactctcccttcattctggtttccatgtgaatttgctttagaaaagccaagtatgggctgtttcacgtgttcagacttgtgttttcatagcattcatggcggggctgcaaggcttggaagtgaccaggaagacagtgagaacgcgtggttggacaactgaaatgatgcagatcagatggcgtttctcccagctcagtggattttctttggggttattcttaaaaatatccatcactacactggaagtccctgttctgactatgtactgtccacctgcattacanacattctgcagagctgctaagtatatacatatccgatgtgtgttacatcttgtatttaattaaatgctatgaaactgaaaaaaaaaaaaaa

SEQ ID NO: 64 - DNA, 3944 bp, Homo sapiens
ggggggatttcggcggcggaaacatggcggtcgcggccgggccggtaacggagaaagtttacgccgacactggcctgtattagcgcgtatggcctcgggccctcgttccccaaggcgtgccgcctccctgttctcagtcgcaggctgaagccttgtctgctctcctcctttttggtttggttttggaactgactccgagggttgggagagcgcgttggtggcgacggccgagtcagatcactataaacaaaatttccacaagagaaaatgttgaaataggagttgcggatacattggatatactggatgaaatacaagcggttaatttttgtaacgtgagggaaaagcccacattgctggttacatgtgtaaatcactgcgttattgctttagtcattgtctctatttagcaatgacaagactggaagaagtaaatagagaagtgaacatgcattcttcagtgcggtatcttggctatttagccagaatcaatttattggttgctatatgcttaggtctatacgtaagatgggaaaaaacagcaaattccttaattttggtaatttttattcttggtctttttgttcttggaatcgccagcatactctattactatttttcaatggaagcagcaagtttaagtctctccaatctttggtttggattcttgcttggcctcctatgttttcttgataattcatcctttaaaaatgatgtaaaagaagaatcaaccaaatatttgcttctaacatccatagtgttaaggatattgtgctctctggtggagagaatttctggctatgtccgtcatcggcccactttactaaccacagttgaatttctggagcttgttggatttgccattgccagcacaactatgttggtggagaagtctctgagtgtcattttgcttgttgtagctctggctatgctgattattgatctgagaatgaaatctttcttagctattccaaacttagttatttttgcagttttgttatttttttcctcattggaaactcccaaaaatccgattgcttttgcgtgtttttttatttgcctgataactgatcctttccttgacatttattttagtggactttcagtaactgaaagatggaaaccctttttgtaccgtggaagaatttgcagaagactttcagtcgtttttgctggaatgattgagcttacattttttattctttccgcattcaaacttagagacactcacctctggtattttgtaatacctggcttttccatttttggaattttcaggatgatttgtcatattatttttcttttaactctttggggattccataccaaattaaatgactgccataaagtatattttactcacaggacagattacaatagccttgatagaatcatggcatccaaagggatgcgccatttttgcttgatttcagagcagttggtgttctttagtcttcttgcaacagcgattttgggagcagtttcctggcagccaacaaatggaattttcttgagcatgttcctaatcgttttgccattggaatccatggctcatgggctcttccatgaattgggtaactgtttaggaggaacatctgttggatatgctattgtgattcccaccaacttctgcagtcctgatggtcagccaacactgcttcccccagaacatgtacaggagttaaatttgaggtctactggcatgctcaatgctatccaaagattttttgcatatcatatgattgagacctatggatgtgactattccacaagtggactgtcatttgatactctgcattccaaactaaaagctttcctcgaacttcggacagtggatggacccagacatgatacgtatattttgtattacagtgggcacacccatggtacaggagagtgggctctagcaggtggagatacactacgccttgacacacttatagaatggtggagagaaaagaatggttccttttgttcccggcttattatcgtattagacagcgaaaattcaaccccttgggtgaaagaagtgaggaaaattaatgaccagtatattgcagtgcaaggagcagagttgataaaaacagtagatattgaagaagctgacccgccacagctaggtgactttacaaaagactgggtagaatataactgcaactcctgtaataacatctgctggactgaaaagggacgcacagtgaaagcagtatatggtgtgtcaaaacggtggagtgactacactctgcatttgccaacgggaagcgatgtggccaagcactggatgttacactttcctcgtattacatatcccctagtgcatttggcaaattggttatgcggtctgaaccttttttggatctgcaaaacttgttttaggtgcttgaaaagattaaaaatgagttggtttcttcctactgtgctggacacaggacaaggcttcaaacttgtcaaatcttaatttggaccccaaagcgggatattaataagcactcatactaccaattatcactaacttgccattttttgtatgctgtatttttatttgtggaaaataccttgctacttctgtagctgctctcactttgtcttttcttaagtaattatggtatatataaggcgttgggaaaaaacattttataatgaaagtatgtagggagtcaaatgcttactgtaaatgcataagagacgttaaaaataacactgcactttcaggaatgtttgcttatggtcctgattagaaagaaacagttgtctatgctctgcaatggtcaatgatgaattactaatgccttattttctaggcatataataatagtttagagaatgtagaccagataaatttgtttactgttttaagaaaactaccagtttacttacagaagattcttttttccaaacagtaggtttcatccaagaccatttgaagaactgcaaactctttctcttagaaaagaaagagggcagcctaaaataaacgcaaaatttgcttatactccatcacattcagatgtcttggttgtgacttattaccagtgtggcagagaacccaagttacattttagatcaaaatattctttatgtaggtattgttaaaaggctagagcctacaagttgctcttccatgcgttggtcagggggccctgaaaacactggtaatattaagagtctttctcagggtaacttaatgttttcttaatgaacagtgtttccagctacaaattcttccaataaattgtcttcctttttgaaaagtactctcatagaagaaatttagcaatttctcgttgactgactcagtctattttaagtattcagaaaagattttgatccccattgagttaatgctctgccttgaaaattatttttctgatccttgttagtgataacattttttttctactgaaggtcagaggataggaaacaagtatttctcttctggtatacatgtaatgtattctgtaaaaaagtattcatattggcaattttagttaggcataatattgtggttgtaatttttaaaacttagtgttttgtctgattaaagcaggcactgatcagggtatctcctaagaggtaattcacttcttattcctttccaataattattacattctaaattttcatctatgagaaataacaaacaagaagggaatagaattaaattggggtataatctaatcttcattgtttaaatggtttgccttctcaccattgaagccatttttttatagcctcagaaagaggaaataatgcctccaccattttctacctggtgacttgaaaattgaacttttaagttaggaagaagttagagtcagggaacttgtataccactatctatgcagcattgttatagtctgattatttctgtgttttgaatatgattttcctaatgctctaaataaaattttgttaaaaatcaaaaaaaaaaaaaaaaaatcgac

SEQ ID NO: 65 - DNA, 2094 bp, Homo sapiens
  exon (1)..(2094)
atgtgtaaatcactgcgttattgctttagtcattgtctctatttagcaatgacaagactggaagaagtaaatagagaagtgaacatgcattcttcagtgcggtatcttggctatttagccagaatcaatttattggttgctatatgcttaggtctatacgtaagatgggaaaaaacagcaaattccttaattttggtaatttttattcttggtctttttgttcttggaatcgccagcatactctattactatttttcaatggaagcagcaagtttaagtctctccaatctttggtttggattcttgcttggcctcctatgttttcttgataattcatcctttaaaaatgatgtaaaagaagaatcaaccaaatatttgcttctaacatccatagtgttaaggatattgtgctctctggtggagagaatttctggctatgtccgtcatcggcccactttactaaccacagttgaatttctggagcttgttggatttgccattgccagcacaactatgttggtggagaagtctctgagtgtcattttgcttgttgtagctctggctatgctgattattgatctgagaatgaaatctttcttagctattccaaacttagttatttttgcagttttgttatttttttcctcattggaaactcccaaaaatccgattgcttttgcgtgtttttttatttgcctgataactgatcctttccttgacatttattttagtggactttcagtaactgaaagatggaaaccctttttgtaccgtggaagaatttgcagaagactttcagtcgtttttgctggaatgattgagcttacattttttattctttccgcattcaaacttagagacactcacctctggtattttgtaatacctggcttttccatttttggaattttcaggatgatttgtcatattatttttcttttaactctttggggattccataccaaattaaatgactgccataaagtatattttactcacaggacagattacaatagccttgatagaatcatggcatccaaagggatgcgccatttttgcttgatttcagagcagttggtgttctttagtcttcttgcaacagcgattttgggagcagtttcctggcagccaacaaatggaattttcttgagcatgttcctaatcgttttgccattggaatccatggctcatgggctcttccatgaattgggtaactgtttaggaggaacatctgttggatatgctattgtgattcccaccaacttctgcagtcctgatggtcagccaacactgcttcccccagaacatgtacaggagttaaatttgaggtctactggcatgctcaatgctatccaaagattttttgcatatcatatgattgagacctatggatgtgactattccacaagtggactgtcatttgatactctgcattccaaactaaaagctttcctcgaacttcggacagtggatggacccagacatgatacgtatattttgtattacagtgggcacacccatggtacaggagagtgggctctagcaggtggagatacactacgccttgacacacttatagaatggtggagagaaaagaatggttccttttgttcccggcttattatcgtattagacagcgaaaattcaaccccttgggtgaaagaagtgaggaaaattaatgaccagtatattgcagtgcaaggagcagagttgataaaaacagtagatattgaagaagctgacccgccacagctaggtgactttacaaaagactgggtagaatataactgcaactcctgtaataacatctgctggactgaaaagggacgcacagtgaaagcagtatatggtgtgtcaaaacggtggagtgactacactctgcatttgccaacgggaagcgatgtggccaagcactggatgttacactttcctcgtattacatatcccctagtgcatttggcaaattggttatgcggtctgaaccttttttggatctgcaaaacttgttttaggtgcttgaaaagattaaaaatgagttggtttcttcctactgtgctggacacaggacaaggcttcaaacttgtcaaatcttaa

SEQ ID NO: 66 - DNA, 1707 bp, Unknown
  RTN4-C
ggagactgcaggcttcggttgaggaaacgggtatttcatgtctcggggtagattttcacagttgcagcttttcggctggtatgcataattgataattgcatctgtagggcagattgtgacaagagatggacggtcagaagaaaaattggaaggacaaggttgttgacctcctctactggagagacattaagaagactggagtggtgtttggtgccagcttgttcctgctgctctcgctgacagtattcagcattgtgagtgtaacggcctacattgccttggccctgctctctgtgactatcagctttaggatatataagggtgtgatccaggctatccagaaatctgatgaaggccacccattcagggcatatttggaatctgaagttgctatatctgaggagttggttcagaagtacagcaattctgctcttggtcatgttaactgcacaataaaagaactcagacgcctcttcttagttgatgatttagttgattctctgaagtttgcagtgttgatgtgggtatttacctatgttggtgccttgttcaatggtctgacactactaattttggctctgatttcactcttcagtgttcctgttatttatgaacggcatcaggcgcaaatagatcattatctgggacttgcaaataagaatgttaaagatgctatggctaaaatccaagcaaaaatccctggattgaagcgtaaagctgaatgagaaagcctgaaagagttaacaatagaggagtttatctttaaaggggatattcatttgattccattggggagggtcagggaagaacaaagccttgacattgcagtgcagtttcacagatctttattttcagcaatgcagtgtctgaggagaaatcacctgtcttgactgccatgtgttcatcaccttaagtattgtaagctgctatgtatggatttgaaccgtaatcatttgtttttcctatatgaggcactggtgaataaaaaaagatctgagaaagctgtatattacattttgttacaggtagtcttgctgtattttgggaattgcagagaaagtggagctgaaaaaaataacccttttcacagtttgtgcactgtgtatggtctgtgtagattggatgcagattttctgaaatgaaatgtttagacgagatcataccactaaagcagaagtgaaaaaacttgcctttctggtatgttctaggtgtattgtgaattttactgttatattaattgccaatataagtaaatatagattatatatatatctatatatagtgtttcacaaagcttagagacctttaccttccagctgccccacagtgcttgatctttcagagagtctttggttgtacgtgtgtagttccaaagcacataagctagaaaaagaaaatatatttctaggtgcactaccatctgttttcaacgtgaaccgacgccatgcacatagaactcttcacgtcgactgcatcgcacagacttgctatagttaattttgtcacaaactctgactctgtggactgaatctaatgcttccaaaaacgttgtttgcaaatatcaaacattgttatgcaagaaatcataaaatgaagatttatacaattgtggtttaagctgtactgaactaaatctgtggaatgcattgtgaactgttaaagcaaagtatcaataaagcttatagacttaaaaaaaaaaaaaaaaaa

SEQ ID NO: 67 - DNA, 600 bp, Unknown
  RTN4-C
  exon (1)..(600)
atggacggtcagaagaaaaattggaaggacaaggttgttgacctcctctactggagagacattaagaagactggagtggtgtttggtgccagcttgttcctgctgctctcgctgacagtattcagcattgtgagtgtaacggcctacattgccttggccctgctctctgtgactatcagctttaggatatataagggtgtgatccaggctatccagaaatctgatgaaggccacccattcagggcatatttggaatctgaagttgctatatctgaggagttggttcagaagtacagcaattctgctcttggtcatgttaactgcacaataaaagaactcagacgcctcttcttagttgatgatttagttgattctctgaagtttgcagtgttgatgtgggtatttacctatgttggtgccttgttcaatggtctgacactactaattttggctctgatttcactcttcagtgttcctgttatttatgaacggcatcaggcgcaaatagatcattatctgggacttgcaaataagaatgttaaagatgctatggctaaaatccaagcaaaaatccctggattgaagcgtaaagctgaatga

SEQ ID NO: 68 - DNA, 4990 bp, Unknown
  RAB6 interacting protein 1
cgctctcggctagctgcagcggcggcggcgcggaggggaaggcatccaggatgcggtgcggggcggcccggtgcccccccgccccgtcacggcagccgcggcggccgaggggaccgggccagggccgggggcggcggcccgagccgcggtagcggcggcggcgggaggggcggcctgagggcggacgggcgggcgcccgggttgcgggggctcggtgccgctccgcactgcccggccggtctcggccccggcgccatgagtggcggcggcggcggagggggctcggcgcccagtcgcttcgccgactactttgtcatctgcggactggacacggagaccgggctggagccggacgagctgtcggcattatgccagtacatacaggcttctaaagccagggatggtgccagccctttcatttcaagtacgactgaaggagaaaattttgagcagacaccattgagaagaacattcaaatctaaggtccttgcacgatatcctgagaacgtagaatggaatccctttgaccaagatgcagtaggaatgctatgtatgccgaaagggctggcattcaagacccaggctgatcccagggagccccaattccatgcctttattatcacaagggaggatggctctcggacatttgggtttgccctcacattttatgaagaggtgactagcaagcagatctgcagtgcaatgcagaccctctaccacatgcacaatgctgagtatgatgtcctacatgctccccctgctgatgacagagaccagagcagcatggaggatggtgaagacactcctgtgaccaaactgcagcgcttcaactcctatgacattagccgggacactctctacgtctctaagtgcatctgcctcatcacacccatgtctttcatgaaggcatgtcggagcgtgctggagcaactccaccaggcagtcacttcacctcagccccctccactgccccttgagagctacatatacaacgtactctacgaggtgccgctcccacctcctggccggtccttgaagttttctggggtctatgggccaataatctgccagagaccaagtaccaatgagcttcccctatttgactttcctgtcaaagaggtttttgaactgctcggggtggagaatgtgtttcagctttttacttgtgcccttctggagtttcaaatcctgctctactcacagcattaccagagactgatgactgtggcggagacgattacagctctcatgtttcctttccagtggcagcatgtctatgtccctattctcccagcttctctcctgcatttcttagatgctcctgttccatacctgatgggtttgcattccaatggcctggatgaccggtcaaagctggagctgcctcaagaggctaacctctgctttgtggacattgacaaccacttcattgagttgccagaggacttgccacagttccccaacaaattggagtttgtccaggaagtctctgagattctcatggcatttggaattccccctgaagggaatcttcattgcagtgagagtgcctccaagctgaagaggctgcgggcctctgagcttgtctcggacaagaggaatgggaacattgctggctcccctttgcattcctacgagcttcttaaggagaatgaaactattgcccggctgcaagccttggtcaagagaactggggtgagcctggaaaagttggaagtgcgtgaagaccccagcagcaataaggatctcaaagttcagtgtgatgaagaagaactcaggatttaccagctaaacattcagatccgggaagtttttgcaaatcgtttcactcagatgtttgcagattatgaggtgtttgtcatccaacccagccaggataaggaatcctggtttaccaacagggagcaaatgcaaaactttgataaagcatcttttctgtcagatcagcctgagccctacctgcccttcctctcaagattcctggagacccagatgtttgcatctttcattgacaacaaaataatgtgtcatgatgatgatgataaagaccctgtactccgggtatttgattcccgagttgacaagatcaggctgttgaatgttcggacacctactctccgtacatccatgtaccagaagtgtaccactgtggatgaagcagagaaagcaattgagctgcgtctggcaaaaattgaccatactgcaattcacccacatttacttgacatgaagattggacaagggaaatatgagccgggcttcttccctaagctgcagtctgatgtactttccactgggccagccagcaacaagtggacgaaaaggaatgcccctgcccagtggaggcggaaagatcggcagaagcagcacacagaacacctgcgtttagataatgaccagagggagaagtacatccaggaagccaggactatgggcagcactatccgccagcccaaactgtccaacctctctccatcagtgattgcccagaccaattggaagtttgtagagggcctgctgaaggaatgccgcaataagaccaagaggatgctggtggaaaagatgggccgagaagctgtggagctagggcatggggaggtgaacatcacaggggtggaagagaacaccctgattgccagcctttgtgatctcctggaaaggatctggagtcatggactacaagtgaaacaggggaaatcagccttatggtcccacctgttacattatcaggacaaccggcagagaaaactcacatcaggaagcctcagtacctcaggaatacttcttgattcagaacgtaggaagtctgatgccagctcactcatgcctcccctgaggatctccctgattcaggatatgaggcacatccagaacatcggggaaatcaagactgatgtgggaaaggccagagcatgggtgcgactgtccatggaaaaaaagttactttccagacacctgaagcagctcctctcagaccatgagctcaccaaaaagttatataagcgctatgccttcctgcgctgtgatgacgagaaggagcagttcctctatcacctcctgtctttcaatgccgtcgattacttttgcttcaccaatgtcttcacaactatcctgatcccgtaccacattctgatcgtaccaagcaagaagctggggggctccatgttcactgccaacccatggatctgtatatcaggagaattgggtgagacacagatcatgcagattcccaggaatgtgctagagatgaccttcgagtgccagaacttggggaagcttactactgtccagattggccatgataactctgggctgtatgccaaatggctggtggagtatgtgatggtcaggaatgagatcacaggacatacctacaagttcccgtgtggccggtggttagggaagggcatggatgatggaagcctggagcggatcctagttggggagctgctcacatcccagcctgaggtggatgagaggccatgccggaccccgccgctgcagcagtcccccagtgtcatccggaggcttgttaccatctctcccaacaacaagcccaagctgaacaccgggcagatccaggagtccatcggggaggcagtcaacggcatcgtgaagcactttcataagcctgagaaagagcgaggcagtctgacgctgttgctttgtggagagtgcggcctcgtctcggccctggaacaggctttccagcatggatttaaatcgccccggctcttcaaaaatgtcttcatttgggatttcctggaaaaagcacaaacctattatgagactttggagcagaatgaagttgtccctgaggaaaactggcatatgagggcccggaacttctgccgatttgtcactgcgatcaacaatactccgcgcagcatcggcaaggacggcaagtttcagatgctggtgtgcctgggagccagagatcacctcctacatcactggattgccctgctggccgactgccccatcaccgcgcacatgtatgaggatgtggcactgatcaaagaccacacactggtcaactccttgatccgcgtgctgcagacattgcaggagttcaacatcacgctggagacgtcccttgtcaagggcatcgacatctgacttccagcaccagcgagcagcgggaccgagagagactcaccctgcagctctgacccttcttcccaaagggacttcagcgagttgtgcaggagacggagaggaaatgtacactcactgtaaaaagaaaactagaggatttttggaataaataatctattttagagtttatttgctgatttgctttttacacactttcatgtgaaagaatgatagagagagggagacgaggttggtgccgcttattttgaagctggcgccctccctcgccgcggccgcgagctgggagcctacggcctccctggactgagcctgtggcactgcgtgcgggacagttatgtttccttgccccgtcgcattaatgaggcccttccacatcatttttaaactaatgtttttctatattaacattattatggatatttggctttcataggccacacacaggtgtgctgcgcgggaagccccatgctccaatcaaagggatttttagtagtgcctctaagcaagcaccgatgagtcagtcccacgtattttcttttttgtcagtattgtttgggaaggagacatgccgggatgtgtcatcgtgccaaataccacatttcctgttggcacagtttcacagaagtaaacataagcatgttttaacaggtttttcttttcttttttcttttttaaaatgttttatttatttaacccgccattgtgtgtttttaagtattttctttttttaaggaaaggaaaagcttgtcacagtctaactggctatgttattactgttaaatttatgttgttttgcaacttagaaaccagctacagtatggcccacttaataaaacacctgaaacgagaaaaaaaaaaaaaaaaaaaaaaa

SEQ ID NO: 69 - DNA, 3864 bp, Unknown
  RAB6 interacting protein 1
  exon (1)..(3864)
atgagtggcggcggcggcggagggggctcggcgcccagtcgcttcgccgactactttgtcatctgcggactggacacggagaccgggctggagccggacgagctgtcggcattatgccagtacatacaggcttctaaagccagggatggtgccagccctttcatttcaagtacgactgaaggagaaaattttgagcagacaccattgagaagaacattcaaatctaaggtccttgcacgatatcctgagaacgtagaatggaatccctttgaccaagatgcagtaggaatgctatgtatgccgaaagggctggcattcaagacccaggctgatcccagggagccccaattccatgcctttattatcacaagggaggatggctctcggacatttgggtttgccctcacattttatgaagaggtgactagcaagcagatctgcagtgcaatgcagaccctctaccacatgcacaatgctgagtatgatgtcctacatgctccccctgctgatgacagagaccagagcagcatggaggatggtgaagacactcctgtgaccaaactgcagcgcttcaactcctatgacattagccgggacactctctacgtctctaagtgcatctgcctcatcacacccatgtctttcatgaaggcatgtcggagcgtgctggagcaactccaccaggcagtcacttcacctcagccccctccactgccccttgagagctacatatacaacgtactctacgaggtgccgctcccacctcctggccggtccttgaagttttctggggtctatgggccaataatctgccagagaccaagtaccaatgagcttcccctatttgactttcctgtcaaagaggtttttgaactgctcggggtggagaatgtgtttcagctttttacttgtgcccttctggagtttcaaatcctgctctactcacagcattaccagagactgatgactgtggcggagacgattacagctctcatgtttcctttccagtggcagcatgtctatgtccctattctcccagcttctctcctgcatttcttagatgctcctgttccatacctgatgggtttgcattccaatggcctggatgaccggtcaaagctggagctgcctcaagaggctaacctctgctttgtggacattgacaaccacttcattgagttgccagaggacttgccacagttccccaacaaattggagtttgtccaggaagtctctgagattctcatggcatttggaattccccctgaagggaatcttcattgcagtgagagtgcctccaagctgaagaggctgcgggcctctgagcttgtctcggacaagaggaatgggaacattgctggctcccctttgcattcctacgagcttcttaaggagaatgaaactattgcccggctgcaagccttggtcaagagaactggggtgagcctggaaaagttggaagtgcgtgaagaccccagcagcaataaggatctcaaagttcagtgtgatgaagaagaactcaggatttaccagctaaacattcagatccgggaagtttttgcaaatcgtttcactcagatgtttgcagattatgaggtgtttgtcatccaacccagccaggataaggaatcctggtttaccaacagggagcaaatgcaaaactttgataaagcatcttttctgtcagatcagcctgagccctacctgcccttcctctcaagattcctggagacccagatgtttgcatctttcattgacaacaaaataatgtgtcatgatgatgatgataaagaccctgtactccgggtatttgattcccgagttgacaagatcaggctgttgaatgttcggacacctactctccgtacatccatgtaccagaagtgtaccactgtggatgaagcagagaaagcaattgagctgcgtctggcaaaaattgaccatactgcaattcacccacatttacttgacatgaagattggacaagggaaatatgagccgggcttcttccctaagctgcagtctgatgtactttccactgggccagccagcaacaagtggacgaaaaggaatgcccctgcccagtggaggcggaaagatcggcagaagcagcacacagaacacctgcgtttagataatgaccagagggagaagtacatccaggaagccaggactatgggcagcactatccgccagcccaaactgtccaacctctctccatcagtgattgcccagaccaattggaagtttgtagagggcctgctgaaggaatgccgcaataagaccaagaggatgctggtggaaaagatgggccgagaagctgtggagctagggcatggggaggtgaacatcacaggggtggaagagaacaccctgattgccagcctttgtgatctcctggaaaggatctggagtcatggactacaagtgaaacaggggaaatcagccttatggtcccacctgttacattatcaggacaaccggcagagaaaactcacatcaggaagcctcagtacctcaggaatacttcttgattcagaacgtaggaagtctgatgccagctcactcatgcctcccctgaggatctccctgattcaggatatgaggcacatccagaacatcggggaaatcaagactgatgtgggaaaggccagagcatgggtgcgactgtccatggaaaaaaagttactttccagacacctgaagcagctcctctcagaccatgagctcaccaaaaagttatataagcgctatgccttcctgcgctgtgatgacgagaaggagcagttcctctatcacctcctgtctttcaatgccgtcgattacttttgcttcaccaatgtcttcacaactatcctgatcccgtaccacattctgatcgtaccaagcaagaagctggggggctccatgttcactgccaacccatggatctgtatatcaggagaattgggtgagacacagatcatgcagattcccaggaatgtgctagagatgaccttcgagtgccagaacttggggaagcttactactgtccagattggccatgataactctgggctgtatgccaaatggctggtggagtatgtgatggtcaggaatgagatcacaggacatacctacaagttcccgtgtggccggtggttagggaagggcatggatgatggaagcctggagcggatcctagttggggagctgctcacatcccagcctgaggtggatgagaggccatgccggaccccgccgctgcagcagtcccccagtgtcatccggaggcttgttaccatctctcccaacaacaagcccaagctgaacaccgggcagatccaggagtccatcggggaggcagtcaacggcatcgtgaagcactttcataagcctgagaaagagcgaggcagtctgacgctgttgctttgtggagagtgcggcctcgtctcggccctggaacaggctttccagcatggatttaaatcgccccggctcttcaaaaatgtcttcatttgggatttcctggaaaaagcacaaacctattatgagactttggagcagaatgaagttgtccctgaggaaaactggcatatgagggcccggaacttctgccgatttgtcactgcgatcaacaatactccgcgcagcatcggcaaggacggcaagtttcagatgctggtgtgcctgggagccagagatcacctcctacatcactggattgccctgctggccgactgccccatcaccgcgcacatgtatgaggatgtggcactgatcaaagaccacacactggtcaactccttgatccgcgtgctgcagacattgcaggagttcaacatcacgctggagacgtcccttgtcaagggcatcgacatctga

SEQ ID NO: 70 - DNA, 2297 bp, Homo sapiens
aaaaaccccagcaggttagcttctcattaaatagcttctcctgagggcagaccttgttaagaagaacaaaatgctctggcgtatttcaaaatggctccttttccccacccactaccagaggcatggataatcaccctgaggacctgtgagagatccaggagcttaaaaaaaattggggagcggggaagagggaatggctaggtccctctgacttgtccacactgatccttcaggtttacctatcctggtacttgttccattggaggcttcagcggctagtttctgctctgtggttaccaatgacacaggagctgagcttccaaaaatttattgaacaatctgacttactaggagaacttaaatatgacttcaatgaaaaagatgaattcagacatactgagacacaaaggccttttgtctttaactattatgaaaatgtccttgagaaaaatagcaagcgctaccaggcccttggccatttgcttgaacaatacatttatgagcttttggagaaagtgtgcaaattagaaaaagtatatatcccacctgaggctgataaagaagaaccaagaagcttctttttcatgagcgagaaagcattaacaaatcaccattctgctcttcttatccttcttcaagaccatggggtctttcgagctggtcagtggagtcaacaggcaataatacatcatggtctccaacatggaagtcagataccatgtattcaaatggcattgcaggcacactatgatgtaattgtgctaaaccccaatgataattttgtggaaccaaaggtggaaaaagagtggaaaggccttttaacacaaaatattgagtcatcttctctaaaaatggttcaaggtgggagctttttctctctccagcatcctcccaaatgcattccaaaaagatgcagcaacacccccgaagaacacacggcttacatatgggattacttcatttcaaagactgaaggcaaggatattgccttcattgtacatggttatggaggcttggtttttatggacttgcttgttcgtagaaggtgggaagtgatgagcaaagtatatgctgttgcacttatcgactctgaacatcacgtaggacaccagctgggaagtgatgtacaattattagcatggataaagcaccactgccgtgaatgggtgacaagtcctaagcctttggataaacctgcagctactgttttcaaaaaggaatttcctatggtttctgctggcacagaaaagtacatcttagccccttcctctagccttcagtcaatttttaagtactttaaaaaagctttaaaagccagaacaaccattaatttctctcgaatgccaatagtgactagaagctccacaaaaagaaagcaaagtgcttaaactacttttgtcatctaagatttttttgtccttctgcaactttgctaatacagattctggaagaaaaaaaaacactttcaactcacacacaatatgatgttctggcttgaggtttgatttgttactttttattatttggtttttatgaggcagggtctgactttgctgcccagggtggtatggaaatctggcctcaagcgaacctcccacctcagcctcccaaagtgctgagattataggcattagccactgcacatggccatggccaggtttgttgctttttttttttttggaggaggaggaggaggagtctctgtcacccaggttggagtgcagtggcaccatctcagctcactgcaacctccacctcctggtttcaagcagttctcctgcctcagcctcccaagtagctgggactacaggcacatgccaccacgcccagctaatttttgtatttttactagagacgggctgttcgccaggctggtctaggactcttgacctcaggtgatccacccaccttggcctcccaaagtgctgggcttacaggcataagccactgcacctggccattttgttgtttttttgaaaagtgaacatattctctcttttgtagcctgttgatgaactgggaattcagtgtcatcgttaatattttacagtgttagttaagtgtgaagatctttcttttaaaaagctgtggtttgatataatgacaacaaaatggcaattgataaaaattagatattgaatcaatctttgatttctataataataccatagtaaaattacaagtgaacataaaaattaaacatcataagcaaactgcattctttgtgtgtttatgttttttgttaagatttgttgtactccctgttcaccaggtctgaagaaaaataaattttaaat

SEQ ID NO: 71 - DNA, 7583 bp, Unknown
  Ras GTPase-activating like protein
ggtattaaaactgatcttttgacatttttgacaatgttcttataaattactttcttttttatcatatatggatgggatgaagcacagagtaagatagagtgcacagcaaaggggatctgcccctcctatctgtccaataccccacaggttttggtgataatcttgggcaatgttccagtcaaacctgcctcccacttctcactaaagttagtgaacatgtgacccacattccccaaataagagcctcttataaactccattcttggctttttcattcatagagatagctattttatgagacatagataaagcattttttagtgatgtgcacgatgccttttttcttaattattaacttctcaaaacataaacacattggaggcacttaataaagggagctgtacgtaccgccgtccgcgcctccaaggtttcacggcttcctcagcagagactcgggctcgtccgccatgtccgccgcagacgaggttgacgggctgggcgtggcccggccgcactatggctctgtcctggataatgaaagacttactgcagaggagatggatgaaaggagacgtcagaacgtggcttatgagtacctttgtcatttggaagaagcgaagaggtggatggaagcatgcctaggggaagatctgcctcccaccacagaactggaggaggggcttaggaatggggtctaccttgccaaactggggaacttcttctctcccaaagtagtgtccctgaaaaaaatctatgatcgagaacagaccagatacaaggcgactggcctccactttagacacactgataatgtgattcagtggttgaatgccatggatgagattggattgcctaagattttttacccagaaactacagatatctatgatcgaaagaacatgccaagatgtatctactgtatccatgcactcagtttgtacctgttcaagctaggcctggcccctcagattcaagacctatatggaaaggttgacttcacagaagaagaaatcaacaacatgaagactgagttggagaagtatggcatccagatgcctgcctttagcaagattgggggcatcttggctaatgaactgtcagtggatgaagccgcattacatgctgctgttattgctattaatgaagctattgaccgtagaattccagccgacacatttgcagctttgaaaaatccgaatgccatgcttgtaaatcttgaagagcccttggcatccacttaccaggatatactttaccaggctaagcaggacaaaatgacaaatgctaaaaacaggacagaaaactcagagagagaaagagatgtttatgaggagctgctcacgcaagctgaaattcaaggcaatataaacaaagtcaatacattttctgcattagcaaatatcgacctggctttagaacaaggagatgcactggccttgttcagggctctgcagtcaccagccctggggcttcgaggactgcagcaacagaatagcgactggtacttgaagcagctcctgagtgataaacagcagaagagacagagtggtcagactgaccccctgcagaaggaggagctgcagtctggagtggatgctgcaaacagtgctgcccagcaatatcagagaagattggcagcagtagcactgattaatgctgcaatccagaagggtgttgctgagaagactgttttggaactgatgaatcccgaagcccagctgccccaggtgtatccatttgccgccgatctctatcagaaggagctggctaccctgcagcgacaaagtcctgaacataatctcacccacccagagctctctgtcgcagtggagatgttgtcatcggtggccctgatcaacagggcattggaatcaggagatgtgaatacagtgtggaagcaattgagcagttcagttactggtcttaccaatattgaggaagaaaactgtcagaggtatctcgatgagttgatgaaactgaaggctcaggcacatgcagagaataatgaattcattacatggaatgatatccaagcttgcgtggaccatgtgaacctggtggtgcaagaggaacatgagaggattttagccattggtttaattaatgaagccctggatgaaggtgatgcccaaaagactctgcaggccctacagattcctgcagctaaacttgagggagtccttgcagaagtggcccagcattaccaagacacgctgattagagcgaagagagagaaagcccaggaaatccaggatgagtcagctgtgttatggttggatgaaattcaaggtggaatctggcagtccaacaaagacacccaagaagcacagaagtttgccttaggaatctttgccattaatgaggcagtagaaagtggtgatgttggcaaaacactgagtgcccttcgctcccctgatgttggcttgtatggagtcatccctgagtgtggtgaaacttaccacagtgatcttgctgaagccaagaagaaaaaactggcagtaggagataataacagcaagtgggtgaagcactgggtaaaaggtggatattattattaccacaatctggagacccaggaaggaggatgggatgaacctccaaattttgtgcaaaattctatgcagctttctcgggaggagatccagagttctatctctggggtgactgccgcatataaccgagaacagctgtggctggccaatgaaggcctgatcaccaggctgcaggctcgctgccgtggatacttagttcgacaggaattccgatccaggatgaatttcctgaagaaacaaatccctgccatcacctgcattcagtcacagtggagaggatacaagcagaagaaggcatatcaagatcggttagcttacctgcgctcccacaaagatgaagttgtaaagattcagtccctggcaaggatgcaccaagctcgaaagcgctatcgagatcgcctgcagtacttccgggaccatataaatgacattatcaaaatccaggcttttattcgggcaaacaaagctcgggatgactacaagactctcatcaatgctgaggatcctcctatggttgtggtccgaaaatttgtccacctgctggaccaaagtgaccaggattttcaggaggagcttgaccttatgaagatgcgggaagaggttatcaccctcattcgttctaaccagcagctggagaatgacctcaatctcatggatatcaaaattggactgctagtgaaaaataagattacgttgcaggatgtggtttcccacagtaaaaaacttaccaaaaaaaataaggaacagttgtctgatatgatgatgataaataaacagaagggaggtctcaaggctttgagcaaggagaagagagagaagttggaagcttaccagcacctgttttatttattgcaaaccaatcccacctatctggccaagctcatttttcagatgccccagaacaagtccaccaagttcatggactctgtaatcttcacactctacaactacgcgtccaaccagcgagaggagtacctgctcctgcggctctttaagacagcactccaagaggaaatcaagtcgaaggtagatcagattcaagagattgtgacaggaaatcctacggttattaaaatggttgtaagtttcaaccgtggtgcccgtggccagaatgccctgagacagatcttggccccagtcgtgaaggaaattatggatgacaaatctctcaacatcaaaactgaccctgtggatatttacaaatcttgggttaatcagatggagtctcagacaggagaggcaagcaaactgccctatgatgtgacccctgagcaggcgctagctcatgaagaagtgaagacacggctagacagctccatcaggaacatgcgggctgtgacagacaagtttctctcagccattgtcagctctgtggacaaaatcccttatgggatgcgcttcattgccaaagtgctgaaggactcgttgcatgagaagttccctgatgctggtgaggatgagctgctgaagattattggtaacttgctttactaccgatacatgaaccccgccattgttgctcctgatgcctttgacatcattgacctgtcggcaggaggccagcttaccacagaccaacgccgaaatcttggctccattgcaaagatgctccagcatgcagcttccaataagatgtttctgggagataatgctcacttaagcatcattaatgagtatctttcccagtcctaccagaaattcagacggtttttccagactgcttgtgatgtcccagagcttcaggataaatttaatgtggacgagtactctgacttggtgaccctcacaaaaccagtcatctacatttccattggtgagatcatcaacacccacactctcctgttagatcaccaggacgccattgctcctgagcacaacgacccaatccatgagctgctggacgacctgggcgaggtgcccaccatcgagtccctgataggagaaagctctggcaatttaaatgacccaaacaaggaggcgctggctaagacagaagtctctctcacattgaccaacaagttcgacgtgcctggcgatgagaatgcagaaatggacgctcggaccatcttgctgaacacaaagcgtttaattgtggatgtcatccggttccagcccggagagaccttgactgaaatcctggagacaccagctaccagtgaacaggaagcagaacatcagagggccatgcagagacgtgctattcgtgacgccaaaactcctgacaagatgaaaaagtcaaaatttgtaaaggaagacaacaacctcactcttcaggagaagaaggagaagatccagtcgggcttgaagaagctgacagagcttgggaccgtggacccaaagaacagataccaggaactgatcaacgacattgccagggatattcggaatcagcggaggtaccgacagaggagaaaggccgaactagtgaaactgcaacagacatacgctgctctgaactctaaggccaccttttatggggagcaggtggattactataaaagctatatcaaaacctgcttggataacttagccagcaagggcaaagtctccaaaaagcctagggaaatgaaaggaaagaaaagcaaaaagatttctctgaaatatacagcagcaagactacatgaaaaaggagttcttctggaaattgaggacctgcaagtgaatcagtttaaaaatgttatatttgaaatcagtccaacagaagaagttggagacttcgaagtgaaagccaaattcatgggagttcaaatggagacttttatgttacattatcaggacctgctgcagctacagtatgaaggagttgcagtcatgaaattatttgatagagctaaagtaaatgtcaacctcctgatcttccttctcaacaaaaagttctacgggaagtaattgatcgtttgctgccagcccagaaggatgaaggaaagaagcacctcacagctcctttctaggtccttctttcctcattggaagcaaagacctagccaacaacagcacctcaatctgatacactcccgatgccacatttttaactcctctcgctctgatgggacatttgttacccttttttcatagtgaaattgtgtttcaggcttagtctgacctttctggtttcttcattttcttccattacttaggaaagagtggaaactccactaaaatttctctgtgttgttacagtcttagaggttgcagtactatattgtaagctttggtgtttgtttaattagcaatagggatggtaggattcaaatgtgtgtcatttagaagtggaagctattagcaccaatgacataaatacatacaagacacagaactaaaatgtcatgttattaacagttattaggttgtcatttaaaaataaagttcctttatatttctgtcccatcaggaaaactgaaggatatggggaatcattggttatcttccattgtgtttttctttatggacaggagctaatggaagtgacagtcatgttcaaaggaagcatttctagaaaaaaggagataatgtttttaaatttcattatcaaacttgggcaattctgtttgtgtaactccccgactagtggatgggagagtcccattgctaaaattcagctactcagataaattcagaatgggtcaaggcacctgcctgtttttgttggtgcacagagattgacttgattcagagagacaattcactccatccctatggcagaggaacgggttagccctagtggagaagggaattgttttcaaaactgttttatatcttaagagtgccttattaaagtgtagatttacttcttaaaatgtggatgataggaatttaaagatttatataatgcttcaaaagcctttagaatactgtaagaaaagggttttttaaaaattgggcttatctgtatatctgaactcttagaactttcttatagctgaaacactaggatttatctgcagggttgcagagagagaatcctgcctgaaatagactcaaacaaaaccaaacaaaaccagccgacgctgttacacttgatattaaaatctgttttccctcatttctttctcttttctcttgctgcccacatggtgcctttatttttatgagctccagttttatgggtttagtttaaaaaaaaaatcaagtctaaacattgcatttagaaagcttttgttcttggataaaaagtcatacactttaaaaaaaaaaaaaaaacttttttccaggaaaatatattgaaatcatgctgctgagcctccactttctctgatgtgttggttcagttttcttttatcataaatttttagcatttaaaaattcactgatgtacattaagccaataaactgctttaatgaataacaaactatgtagtgtgtccctattataaatgcattggagaagtatttttatgagactctttactcaggtgcatggttacagccacagggaggcatggagtgccatggaaggattcgccactacccagaccttgttttttgttgtattttggaagacaggttttttaaagaaacattttcctcagattaaaagatgatgctattacaactagcattgcctcaaaaactgggaccaaccaaagtgtgtcaaccctgtttccttaaaagaggctatgaatcccaaaggccacatccaagacaggcaataatgagcagagtttacagctcctttaataaaatgtgtcagtaattttaaggtttatagttccctcaacacaattgctaatgcagaatagtgtaaaatgcgcttcaagaatgttgatgatgatgatatagaattgtggctttagtagcacagaggatgccccaacaaactcatggcgttgaaaccacacagttctcattactgttatttattagctgtagcattctctgtctcctctctctcctcctttgaccttctcctcgaccagccatcatgacatttaccatgaatttacttcctcccaagagtttggactgcccgtcagattgtttctgcacatagttgcctttgtatctctgtatgaaataaaaggtcatttgttc

SEQ ID NO: 72 - DNA, 4974 bp, Unknown
  Ras GTPase-activating-like protein
  exon (1)..(4974)
atgtccgccgcagacgaggttgacgggctgggcgtggcccggccgcactatggctctgtcctggataatgaaagacttactgcagaggagatggatgaaaggagacgtcagaacgtggcttatgagtacctttgtcatttggaagaagcgaagaggtggatggaagcatgcctaggggaagatctgcctcccaccacagaactggaggaggggcttaggaatggggtctaccttgccaaactggggaacttcttctctcccaaagtagtgtccctgaaaaaaatctatgatcgagaacagaccagatacaaggcgactggcctccactttagacacactgataatgtgattcagtggttgaatgccatggatgagattggattgcctaagattttttacccagaaactacagatatctatgatcgaaagaacatgccaagatgtatctactgtatccatgcactcagtttgtacctgttcaagctaggcctggcccctcagattcaagacctatatggaaaggttgacttcacagaagaagaaatcaacaacatgaagactgagttggagaagtatggcatccagatgcctgcctttagcaagattgggggcatcttggctaatgaactgtcagtggatgaagccgcattacatgctgctgttattgctattaatgaagctattgaccgtagaattccagccgacacatttgcagctttgaaaaatccgaatgccatgcttgtaaatcttgaagagcccttggcatccacttaccaggatatactttaccaggctaagcaggacaaaatgacaaatgctaaaaacaggacagaaaactcagagagagaaagagatgtttatgaggagctgctcacgcaagctgaaattcaaggcaatataaacaaagtcaatacattttctgcattagcaaatatcgacctggctttagaacaaggagatgcactggccttgttcagggctctgcagtcaccagccctggggcttcgaggactgcagcaacagaatagcgactggtacttgaagcagctcctgagtgataaacagcagaagagacagagtggtcagactgaccccctgcagaaggaggagctgcagtctggagtggatgctgcaaacagtgctgcccagcaatatcagagaagattggcagcagtagcactgattaatgctgcaatccagaagggtgttgctgagaagactgttttggaactgatgaatcccgaagcccagctgccccaggtgtatccatttgccgccgatctctatcagaaggagctggctaccctgcagcgacaaagtcctgaacataatctcacccacccagagctctctgtcgcagtggagatgttgtcatcggtggccctgatcaacagggcattggaatcaggagatgtgaatacagtgtggaagcaattgagcagttcagttactggtcttaccaatattgaggaagaaaactgtcagaggtatctcgatgagttgatgaaactgaaggctcaggcacatgcagagaataatgaattcattacatggaatgatatccaagcttgcgtggaccatgtgaacctggtggtgcaagaggaacatgagaggattttagccattggtttaattaatgaagccctggatgaaggtgatgcccaaaagactctgcaggccctacagattcctgcagctaaacttgagggagtccttgcagaagtggcccagcattaccaagacacgctgattagagcgaagagagagaaagcccaggaaatccaggatgagtcagctgtgttatggttggatgaaattcaaggtggaatctggcagtccaacaaagacacccaagaagcacagaagtttgccttaggaatctttgccattaatgaggcagtagaaagtggtgatgttggcaaaacactgagtgcccttcgctcccctgatgttggcttgtatggagtcatccctgagtgtggtgaaacttaccacagtgatcttgctgaagccaagaagaaaaaactggcagtaggagataataacagcaagtgggtgaagcactgggtaaaaggtggatattattattaccacaatctggagacccaggaaggaggatgggatgaacctccaaattttgtgcaaaattctatgcagctttctcgggaggagatccagagttctatctctggggtgactgccgcatataaccgagaacagctgtggctggccaatgaaggcctgatcaccaggctgcaggctcgctgccgtggatacttagttcgacaggaattccgatccaggatgaatttcctgaagaaacaaatccctgccatcacctgcattcagtcacagtggagaggatacaagcagaagaaggcatatcaagatcggttagcttacctgcgctcccacaaagatgaagttgtaaagattcagtccctggcaaggatgcaccaagctcgaaagcgctatcgagatcgcctgcagtacttccgggaccatataaatgacattatcaaaatccaggcttttattcgggcaaacaaagctcgggatgactacaagactctcatcaatgctgaggatcctcctatggttgtggtccgaaaatttgtccacctgctggaccaaagtgaccaggattttcaggaggagcttgaccttatgaagatgcgggaagaggttatcaccctcattcgttctaaccagcagctggagaatgacctcaatctcatggatatcaaaattggactgctagtgaaaaataagattacgttgcaggatgtggtttcccacagtaaaaaacttaccaaaaaaaataaggaacagttgtctgatatgatgatgataaataaacagaagggaggtctcaaggctttgagcaaggagaagagagagaagttggaagcttaccagcacctgttttatttattgcaaaccaatcccacctatctggccaagctcatttttcagatgccccagaacaagtccaccaagttcatggactctgtaatcttcacactctacaactacgcgtccaaccagcgagaggagtacctgctcctgcggctctttaagacagcactccaagaggaaatcaagtcgaaggtagatcagattcaagagattgtgacaggaaatcctacggttattaaaatggttgtaagtttcaaccgtggtgcccgtggccagaatgccctgagacagatcttggccccagtcgtgaaggaaattatggatgacaaatctctcaacatcaaaactgaccctgtggatatttacaaatcttgggttaatcagatggagtctcagacaggagaggcaagcaaactgccctatgatgtgacccctgagcaggcgctagctcatgaagaagtgaagacacggctagacagctccatcaggaacatgcgggctgtgacagacaagtttctctcagccattgtcagctctgtggacaaaatcccttatgggatgcgcttcattgccaaagtgctgaaggactcgttgcatgagaagttccctgatgctggtgaggatgagctgctgaagattattggtaacttgctttactaccgatacatgaaccccgccattgttgctcctgatgcctttgacatcattgacctgtcggcaggaggccagcttaccacagaccaacgccgaaatcttggctccattgcaaagatgctccagcatgcagcttccaataagatgtttctgggagataatgctcacttaagcatcattaatgagtatctttcccagtcctaccagaaattcagacggtttttccagactgcttgtgatgtcccagagcttcaggataaatttaatgtggacgagtactctgacttggtgaccctcacaaaaccagtcatctacatttccattggtgagatcatcaacacccacactctcctgttagatcaccaggacgccattgctcctgagcacaacgacccaatccatgagctgctggacgacctgggcgaggtgcccaccatcgagtccctgataggagaaagctctggcaatttaaatgacccaaacaaggaggcgctggctaagacagaagtctctctcacattgaccaacaagttcgacgtgcctggcgatgagaatgcagaaatggacgctcggaccatcttgctgaacacaaagcgtttaattgtggatgtcatccggttccagcccggagagaccttgactgaaatcctggagacaccagctaccagtgaacaggaagcagaacatcagagggccatgcagagacgtgctattcgtgacgccaaaactcctgacaagatgaaaaagtcaaaatttgtaaaggaagacaacaacctcactcttcaggagaagaaggagaagatccagtcgggcttgaagaagctgacagagcttgggaccgtggacccaaagaacagataccaggaactgatcaacgacattgccagggatattcggaatcagcggaggtaccgacagaggagaaaggccgaactagtgaaactgcaacagacatacgctgctctgaactctaaggccaccttttatggggagcaggtggattactataaaagctatatcaaaacctgcttggataacttagccagcaagggcaaagtctccaaaaagcctagggaaatgaaaggaaagaaaagcaaaaagatttctctgaaatatacagcagcaagactacatgaaaaaggagttcttctggaaattgaggacctgcaagtgaatcagtttaaaaatgttatatttgaaatcagtccaacagaagaagttggagacttcgaagtgaaagccaaattcatgggagttcaaatggagacttttatgttacattatcaggacctgctgcagctacagtatgaaggagttgcagtcatgaaattatttgatagagctaaagtaaatgtcaacctcctgatcttccttctcaacaaaaagttctacgggaagtaa

SEQ ID NO: 73 - DNA, 4300 bp, Unknown
  Sialyltransferase 1 (beta-galactoside alpha-2, 6-sialyltransferase) transcript variant 2
gaggaggttcctgtagggcggcacaaccagggagggcgtggaagctctgcatcccttctcccataccttgctctacacatctcttcatctgtatcctctgcagcatccttgatgataaaccagtaaatatgagttttgatcatcctgagaaaaatgggccttggcctgcagacccaataaaccttccctcccatggataatagtgctaattcctgaggacctgaagggcctgccgcccctgggggattagccagaagcaggcttgttttcctgctcagaacaaagtgacttccctgaacacatcttcattatgattcacaccaacctgaagaaaaagttcagctgctgcgtcctggtctttcttctgtttgcagtcatctgtgtgtggaaggaaaagaagaaagggagttactatgattcctttaaattgcaaaccaaggaattccaggtgttaaagagtctggggaaattggccatggggtctgattcccagtctgtatcctcaagcagcacccaggacccccacaggggccgccagaccctcggcagtctcagaggcctagccaaggccaaaccagaggcctccttccaggtgtggaacaaggacagctcttccaaaaaccttatccctaggctgcaaaagatctggaagaattacctaagcatgaacaagtacaaagtgtcctacaaggggccaggaccaggcatcaagttcagtgcagaggccctgcgctgccacctccgggaccatgtgaatgtatccatggtagaggtcacagattttcccttcaatacctctgaatgggagggttatctgcccaaggagagcattaggaccaaggctgggccttggggcaggtgtgctgttgtgtcgtcagcgggatctctgaagtcctcccaactaggcagagaaatcgatgatcatgacgcagtcctgaggtttaatggggcacccacagccaacttccaacaagatgtgggcacaaaaactaccattcgcctgatgaactctcagttggttaccacagagaagcgcttcctcaaagacagtttgtacaatgaaggaatcctaattgtatgggacccatctgtataccactcagatatcccaaagtggtaccagaatccggattataatttctttaacaactacaagacttatcgtaagctgcaccccaatcagcccttttacatcctcaagccccagatgccttgggagctatgggacattcttcaagaaatctccccagaagagattcagccaaaccccccatcctctgggatgcttggtatcatcatcatgatgacgctgtgtgaccaggtggatatttatgagttcctcccatccaagcgcaagactgacgtgtgctactactaccagaagttcttcgatagtgcctgcacgatgggtgcctaccacccgctgctctatgagaagaatttggtgaagcatctcaaccagggcacagatgaggacatctacctgcttggaaaagccacactgcctggcttccggaccattcactgctaagcacaggctcctcactcttctccatcaggcattaaatgaatggtctcttggccaccccagcctgggaagaacattttcctgaacaattccagcctgctccttttactctaggggcctctgtcagcaagaccatgggggcttcaagagcctgtggtcaggaaatcaggtccagccttccctgtagccagacagtttatgagcccagagcctcctgccacacacatgcacacatatctagcattctttccagacagcatcctccccgccttccaccttggtagatgcaaggtctatctctcccatcagggctgccaaagctgggctttgtttttcccagcagaatgatgccattctcacaaaccaatgctctatattgcttgaagtctgcatctaaatattgatttcacgttttaaagaaattctcttaaattacaattgtgcccaatgcagggtggctctggggggcaagtaggtggtacaggggattggaaacatgctccgcgcctccagagaaaagttgctcccgaggtccatgcccctggaacgtgttcctatcactctggctggttgggctggtccttagactgggtgcttatgattaaagggtcttggttagcccactttccctctccatgtggagatggaaggtagagaaggatacagtgtctatcctcaagttgctacggttcagtgagagaggcagacatctgaacaggcaggtaggattcagtgtgctcagtgcactggggatttggagagagatgggcttgctctctctgtgcacccaggagggccacgcacttaaaactgtgtttgtggatcagagaaggctttatagcacagggggcattcagatgagtcttagaggaagagaagaaacatggcaagcagattacatctgagccgtttgaattgtgtttttctttcttcccatgtttattttctaagatctacctgaacttagagactcaagatatttttttaggaaacctcctacccatgtctgaggtagcaagtgcagcctcacgacagataccaggcaatccagagccacaaaacgtgattcctccaggctctgcctggcctgaccctgtcctgtcagctgggtttacataccagtcccattcttccttttcaatacctacccccaaatcttctcctaaccaccatctgttttttttttttaaagcattttttgctttaaaagcatcctgaccccaatttctttgagctcacgggccttttgctgaaggtctctcagggtgtagtggtgtggctctctggacttaacgtcactctcagaggtcagaaccttggagatcagaactgattctcaccaggtgtgagaggtgtggtagcagattgcaatgctctgcacctcttccttgcaagtgagcaacttcaggctctctgggcagaggctggcccactgtagtttgcagacatgctctccagatggttttactaagtcccctctccctgatagggaatcctgctggaccagcgcagccctggtgtggagagggtaaaggacttgcacaggatcaccaagtcatgctgtagagccaggattcctagacccagggctctgcactctcaaggctggccccatgtgctcaagggcctccaatgtttgcgctccagaccagccgtctgcaagctggacttctcatttgctgccaaacccttggcttacatatgcagtagaaagagccctggagttagaagccctgggttttcaagttgatgttcctctacttactagctgtgccactctgggcaaatgctcttccttgagcctgtttccacacctgtaaagtggggatgatgatcctatctcactgcttttgtgaggattacaggaaagcacctgtcctggttctgcacctggctcatggcaggtgctcagtacatggtggtgtccttccttcgttcactaaggacctgctctgagctcacacctcggctgcatgcaccctgctgtgacggaggctagtgtggaagaggtcctgtcctcagggaattaactgtcttattgggagacaacaactaccctgcctggggcacccaggaaaccatccgaggcagtggacaacacagaacacgccctcctcctcgctgcctgcagctccaatctgattctgcttgggaatgggctgagcacgtgggctgcttaactgctgtataggacaagccccttacccctctctgggcccatgaattcctggctctctttatgttctgatttgacacattcattgcaatctttgaatcatgaacatgagtgcagaggaaggtggcattccatcagcagaagagagatgttggtgtgggaccctgagactacactgggtagatgctagcttttaattatgattaatataagggatcaaattaatttaaatatgattctgaagtctacagaacttttagttctgtgctgtctatgtggacactttggtaaaatgcaaattatgatatggacgttatcattggtctggtgagctgtttaatatttgtgacagataatttaaaaattatgacttaatgctgcctgtgtctatggggttctgtcttctttgatagccatctattcatctggatcatgggaccctctctaatccttccaacaatcaaataagctatcgatattgttttggagttgagatatcagtctcggaaacttctgaaaaatgctaataattacccaaggattatgtcaaattttaaaataaatgtgtgtgtgtttctttaaaaaaaaaaaaaaaa

SEQ ID NO: 74 - DNA, 1221 bp, Unknown
  Sialyltransferase 1 (beta galactoside alpha-2, 6-sialyltransferase), transcript variant 2
  exon (1)..(1221)
atgattcacaccaacctgaagaaaaagttcagctgctgcgtcctggtctttcttctgtttgcagtcatctgtgtgtggaaggaaaagaagaaagggagttactatgattcctttaaattgcaaaccaaggaattccaggtgttaaagagtctggggaaattggccatggggtctgattcccagtctgtatcctcaagcagcacccaggacccccacaggggccgccagaccctcggcagtctcagaggcctagccaaggccaaaccagaggcctccttccaggtgtggaacaaggacagctcttccaaaaaccttatccctaggctgcaaaagatctggaagaattacctaagcatgaacaagtacaaagtgtcctacaaggggccaggaccaggcatcaagttcagtgcagaggccctgcgctgccacctccgggaccatgtgaatgtatccatggtagaggtcacagattttcccttcaatacctctgaatgggagggttatctgcccaaggagagcattaggaccaaggctgggccttggggcaggtgtgctgttgtgtcgtcagcgggatctctgaagtcctcccaactaggcagagaaatcgatgatcatgacgcagtcctgaggtttaatggggcacccacagccaacttccaacaagatgtgggcacaaaaactaccattcgcctgatgaactctcagttggttaccacagagaagcgcttcctcaaagacagtttgtacaatgaaggaatcctaattgtatgggacccatctgtataccactcagatatcccaaagtggtaccagaatccggattataatttctttaacaactacaagacttatcgtaagctgcaccccaatcagcccttttacatcctcaagccccagatgccttgggagctatgggacattcttcaagaaatctccccagaagagattcagccaaaccccccatcctctgggatgcttggtatcatcatcatgatgacgctgtgtgaccaggtggatatttatgagttcctcccatccaagcgcaagactgacgtgtgctactactaccagaagttcttcgatagtgcctgcacgatgggtgcctaccacccgctgctctatgagaagaatttggtgaagcatctcaaccagggcacagatgaggacatctacctgcttggaaaagccacactgcctggcttccggaccattcactgctaa

SEQ ID NO: 75 - DNA, 3823 bp, Caenorhabditis elegans
ctattttaccagttggaatgaatgatcagaaatgggcatagtgcttttagatccaacatgtaacagatggatgttactccatgctgattacttcttcaagccagtacttttttgattgtgtaggatctttgtctcttcatctttgaattcaattactggaaaataaaaggagttcatgtagtttttgtccaggcttgagtcaccatgagtagtagtttaggaaaagaaaaagactctaaagaaaaagatcccaaagtaccatcagccaaggaaagagaaaaggaggcaaaagcctctggaggttttgggaaagagagcaaagaaaaagaacctaagaccaaagggaaagatgccaaagatggaaagaaggactccagtgctgcccaaccaggggtggcattttcagttgacaatacgatcaaacggccaaacccagcacctgggactagaaaaaaatccagcaatgcagaggtgattaaagagctcaacaaatgccgggaagagaattcaatgcgtttggacttatccaagagatctatacacatattgccatcatcaatcaaagagttgactcaattaacagaactttatttatacagtaacaaattgcagtccctcccagcagaggtgggatgtttagtaaatctcatgacactggctctaagtgaaaattcacttaccagtttgcctgactctcttgataacttgaagaagctgcggatgcttgatttacggcataataaactgagagaaattccttcagtggtgtataggctggattctctcaccactctttaccttcgctttaatcgtataactactgtggaaaaggacatcaaaaacttgtcaaaactcagcatgcttagcattcgagagaacaaaattaaacaactacctgctgaaattggtgaattatgtaacctcattacgctggatgtagctcacaatcaacttgaacaccttccaaaggagattggaaactgtacacagataaccaaccttgacttgcagcacaatgaactgctagacctcccagatactataggaaacctgtccagtttaagtcgtcttggtctgagatataacagactgtcagcaatacccagatcattagcaaaatgcagtgcacttgaagaattaaatttagagaacaataacatttctactttaccagagagtcttttatcaagtcttgtgaaactgaatagtttgaccttagctagaaattgcttccagttgtatccagtgggtggtccatctcagttttctaccatctattccctcaacatggaacacaatcgaatcaacaaaattccatttggaattttctccagagcaaaagtattaagtaagctgaatatgaaggacaatcagttaacatcacttcccttggattttggaacttggaccagtatggtagaattgaatttagccactaatcagctcacaaagatccctgaggatgtgtctggtctcgtttctcttgaggttcttatcttatcaaacaatcttctaaagaagcttccccatggtcttggaaaccttaggaagttaagagagttggatctagaagagaacaaattggaatccttgccaaatgaaattgcatatcttaaggatttacagaaattagtcttgacaaacaaccagttgaccactcttcccagaggcattggtcaccttactaatctcacacatctgggccttggagagaacctacttactcaccttcctgaagaaattggtacactggagaacctagaagaactgtatttgaatgacaaccccaacctgcatagccttccctttgagctggcactctgcagcaagctttcaatcatgagtattgagaactgtccactcagtcaccttccacctcagattgttgctggggggccttctttcatcattcagttcttaaagatgcagggtccatatcgtgccatggtctgatataaatctgctggtcccacacactgttcaaaaatagactgccattaatgtttcttatctatatctgtatctatttatgtagatattggtatatggcagatttataaaaattgcattatgtgtttctgctaatagaggaatcatagccatttagaattttttttaaattctgtacaaaaggcttatataagttttctttgctgaatttgatggatgtttttctgttgtgtaatctgatatgccagtttgcttaaaacatttgccaacacattatgaagttattaaatttaagggacagaggtagtatagttagatatactttctcttaggaaaaataatgggcaaaaatttttgttgcaacttttcatatatattttccccttaccaattgttttatccttatagtattgtaggccctgaaagtagaatttttctttaacttattttgagatttgagatttaaattttatgtattgtttacagtcagagtaaatcactggatttcttttgtttgttttgatttgctctgttttattcagtcaaatctagagtttgaatcctctgctaaagaatttgcatccactggtgtaaacagtgaaaggtatttgcttgttgaaaaaaaaaactggcaaagtgaaaagatacagtcaaaaatctagaatttctttaattttgcttctctgacgagttgtgaagcaaaatacctgaagtgagtctttgggtaggggaagggtattgagaccttttctagtatgaatattttttaagtttgggggaagagaaacttgcagtgaaaaggagttttttcattcctgaaagttgcagatccacaaaactaacaggataattgggcaaataaattacatataaacacacacaatctatatatgtatatacaatgctatatagatatgtatttattatatcataaactacagtaggtaactttaaggatttcttcctatccttgtacaatgacatgaatgtctttctttgaaaactgcaatgtatgtatgtttcaaggttatttaacagtgtactatggttttatatcttgacttgccttgtacatctttcaattctggaatatctgtgtctaagcacaatatcttcacactgtgctgtattgctgctgaactaaatgcacttttccccacatatggggcactggcttcaaacaattcagttcagtatcattacttttaatctcatctttcctttcttggtagttgttaatacagttatggaaaagaggcacattgcatagaagccattggggagttcagtggaagttctgtaagatgtgcatgtactatttgatgcgttttctttgcttcactgcttttaatacttagcagtattgttggtctaagtcaatttgattattgaggagtctcagagcaaggtgcgttctagatgtcatcctaaaaaacacttcatatataattaatcactattttgtataattacatattgctgcttgtgtgttttttttttttttccatttagttgggcgttgtgttttacacaaaaccatttttgaattaaggctatgatattaagatagaaatttggactgttgttctgcttttcctggcactcaaattcatgactagttttgaggtcaaacctatgttcgtaatgagagattttataaggatcaactaagaaatggaaggcaggtgaagatataaaaccctagaatgcttaaatgtgctgtaaaactattgtagatgtcactggattttaccaagtaatatcctttcttttttttttccccccatctgctgtggcttttcagttaaaattttgtttataaaaggaatttgtttattacagctctacctaaaaaaaaaaaaaaaaaaaaaaa

SEQ ID NO: 76 - DNA, 1749 bp, Caenorhabditis elegans
  exon (1)..(1749)
atgagtagtagtttaggaaaagaaaaagactctaaagaaaaagatcccaaagtaccatcagccaaggaaagagaaaaggaggcaaaagcctctggaggttttgggaaagagagcaaagaaaaagaacctaagaccaaagggaaagatgccaaagatggaaagaaggactccagtgctgcccaaccaggggtggcattttcagttgacaatacgatcaaacggccaaacccagcacctgggactagaaaaaaatccagcaatgcagaggtgattaaagagctcaacaaatgccgggaagagaattcaatgcgtttggacttatccaagagatctatacacatattgccatcatcaatcaaagagttgactcaattaacagaactttatttatacagtaacaaattgcagtccctcccagcagaggtgggatgtttagtaaatctcatgacactggctctaagtgaaaattcacttaccagtttgcctgactctcttgataacttgaagaagctgcggatgcttgatttacggcataataaactgagagaaattccttcagtggtgtataggctggattctctcaccactctttaccttcgctttaatcgtataactactgtggaaaaggacatcaaaaacttgtcaaaactcagcatgcttagcattcgagagaacaaaattaaacaactacctgctgaaattggtgaattatgtaacctcattacgctggatgtagctcacaatcaacttgaacaccttccaaaggagattggaaactgtacacagataaccaaccttgacttgcagcacaatgaactgctagacctcccagatactataggaaacctgtccagtttaagtcgtcttggtctgagatataacagactgtcagcaatacccagatcattagcaaaatgcagtgcacttgaagaattaaatttagagaacaataacatttctactttaccagagagtcttttatcaagtcttgtgaaactgaatagtttgaccttagctagaaattgcttccagttgtatccagtgggtggtccatctcagttttctaccatctattccctcaacatggaacacaatcgaatcaacaaaattccatttggaattttctccagagcaaaagtattaagtaagctgaatatgaaggacaatcagttaacatcacttcccttggattttggaacttggaccagtatggtagaattgaatttagccactaatcagctcacaaagatccctgaggatgtgtctggtctcgtttctcttgaggttcttatcttatcaaacaatcttctaaagaagcttccccatggtcttggaaaccttaggaagttaagagagttggatctagaagagaacaaattggaatccttgccaaatgaaattgcatatcttaaggatttacagaaattagtcttgacaaacaaccagttgaccactcttcccagaggcattggtcaccttactaatctcacacatctgggccttggagagaacctacttactcaccttcctgaagaaattggtacactggagaacctagaagaactgtatttgaatgacaaccccaacctgcatagccttccctttgagctggcactctgcagcaagctttcaatcatgagtattgagaactgtccactcagtcaccttccacctcagattgttgctggggggccttctttcatcattcagttcttaaagatgcagggtccatatcgtgccatggtctga

SEQ ID NO: 77 - DNA, 1053 bp, Unknown
  Complement component 5 receptor 1
atgaactccttcaattataccacccctgattatgggcactatgatgacaaggataccctggacctcaacacccctgtggataaaacttctaacacgctgcgtgttccagacatcctggccttggtcatctttgcagtcgtcttcctggtgggagtgctgggcaatgccctggtggtctgggtgacggcattcgaggccaagcggaccatcaatgccatctggttcctcaacttggcggtagccgacttcctctcctgcctggcgctgcccatcttgttcacgtccattgtacagcatcaccactggccctttggcggggccgcctgcagcatcctgccctccctcatcctgctcaacatgtacgccagcatcctgctcctggccaccatcagcgccgaccgctttctgctggtgtttaaacccatctggtgccagaacttccgaggggccggcttggcctggatcgcctgtgccgtggcttggggtttagccctgctgctgaccataccctccttcctgtaccgggtggtccgggaggagtactttccaccaaaggtgttgtgtggcgtggactacagccacgacaaacggcgggagcgagccgtggccatcgtccggctggtcctgggcttcctgtggcctctactcacgctcacgatttgttacactttcatcctgctccggacgtggagccgcagggccacgcggtccaccaagacactcaaggtggtggtggcagtggtggccagtttctttatcttctggttgccctaccaggtgacggggataatgatgtccttcctggagccatcgtcacccaccttcctgctgctgaataagctggactccctgtgtgtctcctttgcctacatcaactgctgcatcaaccccatcatctacgtggtggccggccagggcttccagggccgactgcggaaatccctccccagcctcctccggaacgtgttgactgaagagtccgtggttagggagagcaagtcattcacgcgctccacagtggacactatggcccagaagacccaggcagtgtag

SEQ ID NO: 78 - DNA, 1053 bp, Unknown; identical to SEQ ID NO: 77
  Complement component 5 receptor 1
  exon (1)..(1053)

SEQ ID NO: 79 - DNA, 3356 bp, Unknown
  Pinin, desmosome associated protein
ggctgtcagtcctttcgcgcctcggcggcgcggcatagcccggctcggcctgtaaagcagtctcaagcctgccgcagggagaagatggcggtcgccgtgagaactttgcaggaacagctggaaaaggccaaagagagtcttaagaacgtggatgagaacattcgcaagctcaccgggcgggatccgaatgacgtgaggcccatccaagccagattgctggccctttctggtcctggtggaggtagaggacgtggtagtttattactgaggcgtggattctcagatagtggaggaggacccccagccaaacagagagaccttgaaggggcagtcagtaggctgggcggggagcgtcggaccagaagagaatcacgccaggaaagcgacccggaggatgatgatgttaaaaagccagcattgcagtcttcagttgtagctacctccaaagagcgcacacgtagagaccttatccaggatcaaaatatggatgaaaagggaaagcaaaggaaccggcgaatatttggcttgttgatgggtacccttcaaaaatttaaacaagaatccactgttgctactgaaaggcaaaagcggcgccaggaaattgaacaaaaacttgaagttcaggcagaagaagagagaaagcaggttgaaaatgaaaggagagaactgtttgaagagaggcgtgctaaacagacagaactgcggcttttggaacagaaagttgagcttgcgcagctgcaagaagaatggaatgaacataatgccaaaataattaaatatataagaactaagacaaagccccatttgttttatattcctggaagaatgtgtccagctacccaaaaactaatagaagagtcacagagaaaaatgaacgctttatttgaaggtagacgcatcgaatttgcagaacaaataaataaaatggaggctaggcctagaagacaatcaatgaaggaaaaagagcatcaggtggtgcgtaatgaagaacagaaggcggaacaagaagagggtaaggtggctcagcgagaggaagagttggaggagacaggtaatcagcacaatgatgtagaaatagaggaagcaggagaggaagaggaaaaggaaatagcgattgttcatagtgatgcagagaaagaacaggaggaggaagaacaaaaacaggaaatggaggttaagatggaggaggaaactgaggtaagggaaagtgagaagcagcaggatagtcagcctgaagaagttatggatgtgctagagatggttgagaatgtcaaacatgtaattgctgaccaggaggtaatggaaactaatcgagttgaaagtgtagaaccttcagaaaatgaagctagcaaagaattggaaccagaaatggaatttgaaattgagccagataaagaatgtaaatccctttctcctgggaaagagaatgtcagtgctttagacatggaaaaggagtctgaggaaaaagaagaaaaagaatctgagccccaacctgagcctgtggctcaacctcagcctcagtctcagccccagcttcagcttcaatcccagtcccaaccagtactccagtcccagcctccctctcagcctgaggatttgtcattagctgttttacagccaacaccccaagttactcaggagcaagggcatttactacctgagaggaaggattttcctgtagagtctgtaaaactcactgaggtaccagtagagccagtcttgacagtacatccagagagcaagagcaaaaccaaaactaggagcagaagtagaggtcgagctagaaataaaacaagcaagagtagaagtcgaagcagtagcagtagcagttctagtagcagttcaaccagtagcagcagtggaagtagttccagcagtggaagtagtagcagtcgcagtagttccagtagcagctccagtacaagtggcagcagcagcagagatagtagcagtagcactagtagtagtagtgagagtagaagtcggagtaggggccggggacataacagagatagaaagcacagaaggagcgtggatcggaagcgaagggatacttcaggactagaaagaagtcacaaatcttcaaaaggtggtagtagtagagatacgaaaggatcaaaggataagaattcccggtccgacaggaaaaggtctatatccgagagtagtcgatcaggcaaaagatcgtcgagaagtgaaagagaccgaaaatcagacaggaaagacaaaaggcgttaatggaagaagccaggctttcttagcctattctttgcagcagaagatttcttgatgagtaaaaggattacctttccttgtaaggaggatgctgccttaagaattgcatgttgtaaaaaatctttttggaaaatacagactgtttgtttaccagacattcttgtactttttgcataattttgtaagagttatttatcaaaattatgtgaggttccaaaatatgtaaaataataataataaaaaaagattaacatcccttgtcatcttttttaaatatcctatactctgcagtaagaatgtatattttaataggtaaatctttaagtctgttcccttctaattctgtatcatacattgcttttgtagaaataaatgtgcatttctttcattagttttgagatgtcctcgttgacgcttgtataataaatatcctcttgataccattttcagcttttatcactagatactgaacgtgattagaatgtctttgaaagtttcctcacttttatttgccttaggcagttattttgagttgtcaaaatcagatctttgcagctttgagggggaacataatagttctccgtgaaatcatttactgttttttctaatctcccttgttattttaatctaagcattttcccctcctcatctttaaaccacgtatttggtagataacttaaaatagtataatttggttggcattttcttcatgattatgggagcatcattcttttgtctccatggttacttgtgtgatacagcatatatatctgttaaagaaaataatcacttctttctaggggagggaggtagaaaagtatattctaaatttggtttttgagtttgtggtcttgtcttaacttttgtgttggctctaactctgaaacatgccaataatgtgttttcaagaatttttgtttaagtattgtatgaaagtttacaaaatgaaggaagttaatctacacttgaatctgtgagcaagataacacgcaagtgtaccaagtgattattaactttgttttataaatttgtatgaatttggagtatctgttgcccattactatacatgtgcaaataaatgtggcttagacttgtgtgactgcttaaaaaaaaaaaaaaaa

SEQ ID NO: 80 - DNA, 2154 bp, Unknown
  Pinin, desmosome associated protein
  exon (1)..(2154)
atggcggtcgccgtgagaactttgcaggaacagctggaaaaggccaaagagagtcttaagaacgtggatgagaacattcgcaagctcaccgggcgggatccgaatgacgtgaggcccatccaagccagattgctggccctttctggtcctggtggaggtagaggacgtggtagtttattactgaggcgtggattctcagatagtggaggaggacccccagccaaacagagagaccttgaaggggcagtcagtaggctgggcggggagcgtcggaccagaagagaatcacgccaggaaagcgacccggaggatgatgatgttaaaaagccagcattgcagtcttcagttgtagctacctccaaagagcgcacacgtagagaccttatccaggatcaaaatatggatgaaaagggaaagcaaaggaaccggcgaatatttggcttgttgatgggtacccttcaaaaatttaaacaagaatccactgttgctactgaaaggcaaaagcggcgccaggaaattgaacaaaaacttgaagttcaggcagaagaagagagaaagcaggttgaaaatgaaaggagagaactgtttgaagagaggcgtgctaaacagacagaactgcggcttttggaacagaaagttgagcttgcgcagctgcaagaagaatggaatgaacataatgccaaaataattaaatatataagaactaagacaaagccccatttgttttatattcctggaagaatgtgtccagctacccaaaaactaatagaagagtcacagagaaaaatgaacgctttatttgaaggtagacgcatcgaatttgcagaacaaataaataaaatggaggctaggcctagaagacaatcaatgaaggaaaaagagcatcaggtggtgcgtaatgaagaacagaaggcggaacaagaagagggtaaggtggctcagcgagaggaagagttggaggagacaggtaatcagcacaatgatgtagaaatagaggaagcaggagaggaagaggaaaaggaaatagcgattgttcatagtgatgcagagaaagaacaggaggaggaagaacaaaaacaggaaatggaggttaagatggaggaggaaactgaggtaagggaaagtgagaagcagcaggatagtcagcctgaagaagttatggatgtgctagagatggttgagaatgtcaaacatgtaattgctgaccaggaggtaatggaaactaatcgagttgaaagtgtagaaccttcagaaaatgaagctagcaaagaattggaaccagaaatggaatttgaaattgagccagataaagaatgtaaatccctttctcctgggaaagagaatgtcagtgctttagacatggaaaaggagtctgaggaaaaagaagaaaaagaatctgagccccaacctgagcctgtggctcaacctcagcctcagtctcagccccagcttcagcttcaatcccagtcccaaccagtactccagtcccagcctccctctcagcctgaggatttgtcattagctgttttacagccaacaccccaagttactcaggagcaagggcatttactacctgagaggaaggattttcctgtagagtctgtaaaactcactgaggtaccagtagagccagtcttgacagtacatccagagagcaagagcaaaaccaaaactaggagcagaagtagaggtcgagctagaaataaaacaagcaagagtagaagtcgaagcagtagcagtagcagttctagtagcagttcaaccagtagcagcagtggaagtagttccagcagtggaagtagtagcagtcgcagtagttccagtagcagctccagtacaagtggcagcagcagcagagatagtagcagtagcactagtagtagtagtgagagtagaagtcggagtaggggccggggacataacagagatagaaagcacagaaggagcgtggatcggaagcgaagggatacttcaggactagaaagaagtcacaaatcttcaaaaggtggtagtagtagagatacgaaaggatcaaaggataagaattcccggtccgacaggaaaaggtctatatccgagagtagtcgatcaggcaaaagatcgtcgagaagtgaaagagaccgaaaatcagacaggaaagacaaaaggcgttaa

SEQ ID NO: 81 - DNA, 3421 bp, Unknown
  3-hydroxy-3-methylglutaryl-coenzyme A synthase 1
cggacgcgtgggtcgacccacgcgtccgtcctctgctgccgctcggtcacgcttgctctttcaccatgcctggatcacttcctttgaatgcagaagcttgctggccaaaagatgtgggaattgttgcccttgagatctattttccttctcaatatgttgatcaagcagagttggaaaaatatgatggtgtagatgctggaaagtataccattggcttgggccaggccaagatgggcttctgcacagatagagaagatattaactctctttgcatgactgtggttcagaatcttatggagagaaataacctttcctatgattgcattgggcggctggaagttggaacagagacaatcatcgacaaatcaaagtctgtgaagactaatttgatgcagctgtttgaagagtctgggaatacagatatagaaggaatcgacacaactaatgcatgctatggaggcacagctgctgtcttcaatgctgttaactggattgagtccagctcttgggatggacggtatgccctggtagttgcaggagatattgctgtatatgccacaggaaatgctagacctacaggtggagttggagcagtagctctgctaattgggccaaatgctcctttaatttttgaacgagggcttcgtgggacacatatgcaacatgcctatgatttttacaagcctgatatgctatctgaatatcctatagtagatggaaaactctccatacagtgctacctcagtgcattagaccgctgctattctgtctactgcaaaaagatccatgcccagtggcagaaagagggaaatgataaagattttaccttgaatgattttggcttcatgatctttcactcaccatattgtaaactggttcagaaatctctagctcggatgttgctgaatgacttccttaatgaccagaatagagataaaaatagtatctatagtggcctggaagcctttggggatgttaaattagaagacacctactttgatagagatgtggagaaggcatttatgaaggctagctctgaactcttcagtcagaaaacaaaggcatctttacttgtatcaaatcaaaatggaaatatgtacacatcttcagtatatggttcccttgcatctgttctagcacagtactcacctcagcaattagcagggaagagaattggagtgttttcttatggttctggtttggctgccactctgtactctcttaaagtcacacaagatgctacaccggggtctgctcttgataaaataacagcaagtttatgtgatcttaaatcaaggcttgattcaagaactggtgtggcaccagatgtcttcgctgaaaacatgaagctcagagaggacacctatcatttggtcaactatattccccagggttcaatagattcactctttgaaggaacgtggtacttagttagggtggatgaaaagcacagaagaacttacgctcggcgtcccactccaaatgatgacactttggatgaaggagtaggacttgtgcattcaaacatagcaactgagcatattccaagccctgccaagaaagtaccaagactccctgccacagcagcagaacctgaagcagctgtcattagtaatggggaacattaagatactctgtgaggtgcaagacttcagggtggggtgggcatggggtgggggtatgggaacagttggaggaatgggatatctggggataattttaaaggattacatgttatgtaaatttttatgtgactgacatggagcctggatgactatcgtgtacttgggaaagtctctttgctctatttgctgacatgcttcctgttgtggtctggccaatgccaaatgtactcgaatgatgttaagggctctgtaaaacttcatacctctttggccatttgtatgcatgatgtttggtttttaaacatggtataatgaattgtgtacttctgtcagaagaaagcagaggtactaatctccaattaaaaaattttttaacatgtaagaattttgtactttgaacaacaagattacagaaagtacctgtggtttttggaaaacatttctagcttggggaatgtgacaacattccccagtgtggtaaaattggggtaaaatgtggtaaaatgtgatacgcacaaaccctttgaaaatagcaaaacaaacatgccctttttctaaaattgataaatcctaaagaggaagaaaagagctgggacaataaaacactggctctggaatctggaatgttaagtccaggccagcagtgacaaaagttattgtaatgacctctgaacagagaaacactgccattgaagaggcttctggtatagaaaacatggtacattcaggagctgtgaatatagctctaggtgtgctcctgaatcagttcatggtagattatgctgaacaacagtgagatgttattggaggtgtggatgagggagtttgttgttgcagtccttctttgcaccttattttaaagaataaatgaaacatttttctggttacttttttaaaaatttaaaatggaagggaagaataggggcagggcattattaggctatttctgatgcttcagtgttataaattcaacatagaggctgacaacctaaattcatggtgtaacacagctcttttccttttccttttttttttttttttttggtatctgttcaatgaaaataaggtatgacccaagtttttacctagtctgactagaagtattccacttcaaggtctgaagtaggacttttaccttaaaaaacaacaacaaacaaaactatcacacaggatagataagaagattggttaaacagttttgtgtagatctttttggtgctgaactatgacatgagccttatagattgtaaaatagggatagttggaactaatgtacagaactaaattttttaaactttatttgctgttaaattctgtgaagtttcagttatctaaaataaatatacacaaatatgaaatataatgtttcagattgcaaggtaatatgtaatagtagtgtttgtaagatactcttgtctaatattaactagtagtattttgatttgtacagtcataatttgttaaaatgacttcatttaacattcactgatgtagattaataatgtaagttctgatttaaagaatggtggcaaaatggtgcatgtaatacttttgcaagtgttggggagatcggtatgttttgaaaagagtaatttaacttttgggtgccaggaaatgggttttctcaaagtccattgccggcaatgggcaggcctgcaaatactggcacagagcattaatcatacaccttattaacggtgaggtgaataactttgaaataaagttttagagaaatgtttcaaaaaaaaaaaaaaaaaaaaaaaaaaaaaaaaaaaaaaaaaaaaaaaaaaaaaaaa

SEQ ID NO: 82 - DNA, 1563 bp, Unknown
  3-hydroxy-3-methylglutaryl-Coenzyme A synthase 1
  exon (1)..(1563)
atgcctggatcacttcctttgaatgcagaagcttgctggccaaaagatgtgggaattgttgcccttgagatctattttccttctcaatatgttgatcaagcagagttggaaaaatatgatggtgtagatgctggaaagtataccattggcttgggccaggccaagatgggcttctgcacagatagagaagatattaactctctttgcatgactgtggttcagaatcttatggagagaaataacctttcctatgattgcattgggcggctggaagttggaacagagacaatcatcgacaaatcaaagtctgtgaagactaatttgatgcagctgtttgaagagtctgggaatacagatatagaaggaatcgacacaactaatgcatgctatggaggcacagctgctgtcttcaatgctgttaactggattgagtccagctcttgggatggacggtatgccctggtagttgcaggagatattgctgtatatgccacaggaaatgctagacctacaggtggagttggagcagtagctctgctaattgggccaaatgctcctttaatttttgaacgagggcttcgtgggacacatatgcaacatgcctatgatttttacaagcctgatatgctatctgaatatcctatagtagatggaaaactctccatacagtgctacctcagtgcattagaccgctgctattctgtctactgcaaaaagatccatgcccagtggcagaaagagggaaatgataaagattttaccttgaatgattttggcttcatgatctttcactcaccatattgtaaactggttcagaaatctctagctcggatgttgctgaatgacttccttaatgaccagaatagagataaaaatagtatctatagtggcctggaagcctttggggatgttaaattagaagacacctactttgatagagatgtggagaaggcatttatgaaggctagctctgaactcttcagtcagaaaacaaaggcatctttacttgtatcaaatcaaaatggaaatatgtacacatcttcagtatatggttcccttgcatctgttctagcacagtactcacctcagcaattagcagggaagagaattggagtgttttcttatggttctggtttggctgccactctgtactctcttaaagtcacacaagatgctacaccggggtctgctcttgataaaataacagcaagtttatgtgatcttaaatcaaggcttgattcaagaactggtgtggcaccagatgtcttcgctgaaaacatgaagctcagagaggacacctatcatttggtcaactatattccccagggttcaatagattcactctttgaaggaacgtggtacttagttagggtggatgaaaagcacagaagaacttacgctcggcgtcccactccaaatgatgacactttggatgaaggagtaggacttgtgcattcaaacatagcaactgagcatattccaagccctgccaagaaagtaccaagactccctgccacagcagcagaacctgaagcagctgtcattagtaatggggaacattaa

SEQ ID NO: 83 - DNA, 3222 bp, Unknown
  Down-regulator of transcription 1, TBP-binding (negative cofactor 2)
gagcggcttcctgcaaaccttccctggcatctggagggaccaccgttgccgcgtcttcggcttccacgatctgcgttcgggctacgcggccacggcggcagccactgcgactcccactgtgcctggctctgtccatattagttcccaggcggccgtcgccgttccagcagcggcagcggcagcggcagcggcggacatgttgtgaggcggcggcgcgggtgtctgaaggatggtttggccgaggcggcggcaacggctgctggcggcggcggcagcggcagcggggcctcgggctctatagagccgagcccgctgggtacccgcccggtaccgcggcgaggccagtgcccctggatcttgcctctgctccgacgccgttggggaccagttaggcgacagcgcccgcccctctgaggagacacgaaggtggttccccagccgctcaaatttccggaccaccgcgctttcccctcctcagcctgggctgtgctctctctagaatcctcgggcccccactttcttcccaaactcatcctaaatctctcacacacgcgagtgttcccagccctcaagccagctgctcctccgttcattttctgcaccctcttcgcaaagcaccccccgggatcactctccgagggcgactttttgagaaatctcggtggagtagtggaccagagctggggagtttttaaaagccggggcgcgagaaacaggaaggtactatggcttcctcgtctggcaacgatgatgatctcactatccccagagctgctatcaataaaatgatcaaagagactcttcctaatgtccgggtggccaacgatgctcgagagctggtggtgaactgctgcactgaattcattcaccttatatcttctgaagccaatgagatttgtaacaaatcggaaaagaagaccatctcaccagagcatgtcatacaagcactagaaagtttgggatttggctcttacatcagtgaagtaaaagaagtcttgcaagagtgtaaaacagtagcattaaaaagaagaaaggccagttctcgtttggaaaaccttggcattcctgaagaagagttattgagacagcaacaagaattatttgcaaaagctagacagcaacaagcagaattggcccaacaggaatggcttcaaatgcagcaagctgcccaacaagcccagcttgctgctgcctcagccagtgcatctaatcaggcgggatcttctcaggatgaagaagatgatgatgatatctgaaattcaccagctgagtttctatttcttctataaatgtttttccctgcacaacaaaaacagtgaaagaaatgcttatctgtaattttgtatgcatcttggtggacttgtcattggtattctagggatgtctgctattaagtttcatctattgtgtgctatacatgtaaaaactgtctctttgaactattgaaaatttaaggttcagtataatatcaattttgaatttttaatggtgtttatgaaattttagatagcagcgagtccttcgtttgatcaataaacagtgttacagataacttcaagtttataaaaatacagtgaaatttctacaaagctctaaatctgcatttgcatttcctctgcccttttaactaaactaaaacttgtgaattttaaattattaaggggggggtgctgtgtgaatcagtagacattggattgggttggtgaaagagttcagttctgtagtatctgaatttgtcttttaaaatgagtacatatataggcaataaatatatatgctcagatcaatatacttgtttagaaaaacttcaagacattcaaaaactaggaaggagtatgtttaatagtatttgtataaatttggtggttatgtttttttattttgtttctgttttgtgtagaggtaaaaactatagttttattacagcataattcattttgagctccactatgacatttcaaagactgcccagtttggaagtctgtcatgatttttactctttcactccaattcagtaattgttgatagtattacttacctagtccatccatactcatattattcaaatatataggtggtacttttgaaacaattacattggttctcttggtttaactgaggtttatgaatattcaaacctttgctgggggaaagaaatgaaagttaatgagcatgcttgctatgagagagggatttttaatttaacttgtagttatagtttacttattgtttttagaattacttttacattttcccaactagatggcctagagtccaacattaccttttgagatgacattattgtctccataattgagtgatagctttaaaaaaaagattagttttgcttaagaagttatgttacaactgatcagccctatatgaattaactgatcagccctatatgaaacataagttgtgttataacttatcagccgtatatggaacataaatagtttctacctgcttgttagagaagctttaatttggttctaataaatacagtatggtagtgtttataggaatccaggatgttgaagaaatggcataatgtctatattttggaaacagaaaggaaaagtcacttaagatagtattaagtaattaaattcctatgtcagttgccaaatcttttaaacttatgtattcaccaagcccaaaaatagattgtggctcccaggattccaattttaattggagagctaagtaagtaaagttttataactgttaggtttcttaatgatcatattttgcagttttagtaaaagggaaatattgttatacatttattaaatatacttcccccatgaagtgaaaaggttaattttgctgaatgttttaagttgaagttacttcatggatgtcatacccatgaagtgcatttggatgagatagaagaaattgttttttaaaaagtttaagtaccaaaggtagtctagtctagaacgataagttaatacgtgttggcttttctaatttgtactgtaacatccttatactttctattttaagtatatctgtttcttaagtaaacaacttagatattttccacacctttttttttttctgatgcagagttcaggttaatattttactgcatctgataatgtattatacgtttgaagcctagtgacttttcattttgacattcttgtgatttcatatgctgtattcttcaagcaataaaattgtgatgtgttttataaaaaaaaaaaaaaaaaa

SEQ ID NO: 84 - DNA, 531 bp, Unknown
  Down-regulator of transcription 1, TBP-binding
  exon (1)..(531)
atggcttcctcgtctggcaacgatgatgatctcactatccccagagctgctatcaataaaatgatcaaagagactcttcctaatgtccgggtggccaacgatgctcgagagctggtggtgaactgctgcactgaattcattcaccttatatcttctgaagccaatgagatttgtaacaaatcggaaaagaagaccatctcaccagagcatgtcatacaagcactagaaagtttgggatttggctcttacatcagtgaagtaaaagaagtcttgcaagagtgtaaaacagtagcattaaaaagaagaaaggccagttctcgtttggaaaaccttggcattcctgaagaagagttattgagacagcaacaagaattatttgcaaaagctagacagcaacaagcagaattggcccaacaggaatggcttcaaatgcagcaagctgcccaacaagcccagcttgctgctgcctcagccagtgcatctaatcaggcgggatcttctcaggatgaagaagatgatgatgatatctga

SEQ ID NO: 85 - DNA, 6951 bp, Homo sapiens
cgtggtttgtagatgtgcttggggagaatgggggcctcttctccaagaagcccggagcctgtcgggccgccggcgcccggtctccccttctgctgcggaggatccctgctggcggttgtggtgctgcttgcgctgccggtggcctggggtcaatgcaatgccccagaatggcttccatttgccaggcctaccaacctaactgatgagtttgagtttcccattgggacatatctgaactatgaatgccgccctggttattccggaagaccgttttctatcatctgcctaaaaaactcagtctggactggtgctaaggacaggtgcagacgtaaatcatgtcgtaatcctccagatcctgtgaatggcatggtgcatgtgatcaaaggcatccagttcggatcccaaattaaatattcttgtactaaaggataccgactcattggttcctcgtctgccacatgcatcatctcaggtgatactgtcatttgggataatgaaacacctatttgtgacagaattccttgtgggctaccccccaccatcaccaatggagatttcattagcaccaacagagagaattttcactatggatcagtggtgacctaccgctgcaatcctggaagcggagggagaaaggtgtttgagcttgtgggtgagccctccatatactgcaccagcaatgacgatcaagtgggcatctggagcggccccgcccctcagtgcattatacctaacaaatgcacgcctccaaatgtggaaaatggaatattggtatctgacaacagaagcttattttccttaaatgaagttgtggagtttaggtgtcagcctggctttgtcatgaaaggaccccgccgtgtgaagtgccaggccctgaacaaatgggagccggagctaccaagctgctccagggtatgtcagccacctccagatgtcctgcatgctgagcgtacccaaagggacaaggacaacttttcacctgggcaggaagtgttctacagctgtgagcccggctacgacctcagaggggctgcgtctatgcgctgcacaccccagggagactggagccctgcagcccccacatgtgaagtgaaatcctgtgatgacttcatgggccaacttcttaatggccgtgtgctatttccagtaaatctccagcttggagcaaaagtggattttgtttgtgatgaaggatttcaattaaaaggcagctctgctagttactgtgtcttggctggaatggaaagcctttggaatagcagtgttccagtgtgtgaacaaatcttttgtccaagtcctccagttattcctaatgggagacacacaggaaaacctctggaagtctttccctttggaaaagcagtaaattacacatgcgacccccacccagacagagggacgagcttcgacctcattggagagagcaccatccgctgcacaagtgaccctcaagggaatggggtttggagcagccctgcccctcgctgtggaattctgggtcactgtcaagccccagatcattttctgtttgccaagttgaaaacccaaaccaatgcatctgactttcccattgggacatctttaaagtacgaatgccgtcctgagtactacgggaggccattctctatcacatgtctagataacctggtctggtcaagtcccaaagatgtctgtaaacgtaaatcatgtaaaactcctccagatccagtgaatggcatggtgcatgtgatcacagacatccaggttggatccagaatcaactattcttgtactacagggcaccgactcattggtcactcatctgctgaatgtatcctctcgggcaatgctgcccattggagcacgaagccgccaatttgtcaacgaattccttgtgggctaccccccaccatcgccaatggagatttcattagcaccaacagagagaattttcactatggatcagtggtgacctaccgctgcaatcctggaagcggagggagaaaggtgtttgagcttgtgggtgagccctccatatactgcaccagcaatgacgatcaagtgggcatctggagcggcccggcccctcagtgcattatacctaacaaatgcacgcctccaaatgtggaaaatggaatattggtatctgacaacagaagcttattttccttaaatgaagttgtggagtttaggtgtcagcctggctttgtcatgaaaggaccccgccgtgtgaagtgccaggccctgaacaaatgggagccggagctaccaagctgctccagggtatgtcagccacctccagatgtcctgcatgctgagcgtacccaaagggacaaggacaacttttcacccgggcaggaagtgttctacagctgtgagcccggctatgacctcagaggggctgcgtctatgcgctgcacaccccagggagactggagccctgcagcccccacatgtgaagtgaaatcctgtgatgacttcatgggccaacttcttaatggccgtgtgctatttccagtaaatctccagcttggagcaaaagtggattttgtttgtgatgaaggatttcaattaaaaggcagctctgctagttattgtgtcttggctggaatggaaagcctttggaatagcagtgttccagtgtgtgaacaaatcttttgtccaagtcctccagttattcctaatgggagacacacaggaaaacctctggaagtctttccctttggaaaagcagtaaattacacatgcgacccccacccagacagagggacgagcttcgacctcattggagagagcaccatccgctgcacaagtgaccctcaagggaatggggtttggagcagccctgcccctcgctgtggaattctgggtcactgtcaagccccagatcattttctgtttgccaagttgaaaacccaaaccaatgcatctgactttcccattgggacatctttaaagtacgaatgccgtcctgagtactacgggaggccattctctatcacatgtctagataacctggtctggtcaagtcccaaagatgtctgtaaacgtaaatcatgtaaaactcctccagatccagtgaatggcatggtgcatgtgatcacagacatccaggttggatccagaatcaactattcttgtactacagggcaccgactcattggtcactcatctgctgaatgtatcctctcaggcaatactgcccattggagcacgaagccgccaatttgtcaacgaattccttgtgggctacccccaaccatcgccaatggagatttcattagcaccaacagagagaattttcactatggatcagtggtgacctaccgctgcaatcttggaagcagagggagaaaggtgtttgagcttgtgggtgagccctccatatactgcaccagcaatgacgatcaagtgggcatctggagcggccccgcccctcagtgcattatacctaacaaatgcacgcctccaaatgtggaaaatggaatattggtatctgacaacagaagcttattttccttaaatgaagttgtggagtttaggtgtcagcctggctttgtcatgaaaggaccccgccgtgtgaagtgccaggccctgaacaaatgggagccagagttaccaagctgctccagggtgtgtcagccgcctccagaaatcctgcatggtgagcataccccaagccatcaggacaacttttcacctgggcaggaagtgttctacagctgtgagcctggctatgacctcagaggggctgcgtctctgcactgcacaccccagggagactggagccctgaagccccgagatgtgcagtgaaatcctgtgatgacttcttgggtcaactccctcatggccgtgtgctatttccacttaatctccagcttggggcaaaggtgtcctttgtctgtgatgaagggtttcgcttaaagggcagttccgttagtcattgtgtcttggttggaatgagaagcctttggaataacagtgttcctgtgtgtgaacatatcttttgtccaaatcctccagctatccttaatgggagacacacaggaactccctctggagatattccctatggaaaagaaatatcttacacatgtgacccccacccagacagagggatgaccttcaacctcattggggagagcaccatccgctgcacaagtgaccctcatgggaatggggtttggagcagccctgcccctcgctgtgaactttctgttcgtgctggtcactgtaaaaccccagagcagtttccatttgccagtcctacgatcccaattaatgactttgagtttccagtcgggacatctttgaattatgaatgccgtcctgggtattttgggaaaatgttctctatctcctgcctagaaaacttggtctggtcaagtgttgaagacaactgtagacgaaaatcatgtggacctccaccagaacccttcaatggaatggtgcatataaacacagatacacagtttggatcaacagttaattattcttgtaatgaagggtttcgactcattggttccccatctactacttgtctcgtctcaggcaataatgtcacatgggataagaaggcacctatttgtgagatcatatcttgtgagccacctccaaccatatccaatggagacttctacagcaacaatagaacatcttttcacaatggaacggtggtaacttaccagtgccacactggaccagatggagaacagctgtttgagcttgtgggagaacggtcaatatattgcaccagcaaagatgatcaagttggtgtttggagcagccctccccctcggtgtatttctactaataaatgcacagctccagaagttgaaaatgcaattagagtaccaggaaacaggagtttcttttccctcactgagatcatcagatttagatgtcagcccgggtttgtcatggtagggtcccacactgtgcagtgccagaccaatggcagatgggggcccaagctgccacactgctccagggtgtgtcagccgcctccagaaatcctgcatggtgagcataccctaagccatcaggacaacttttcacctgggcaggaagtgttctacagctgtgagcccagctatgacctcagaggggctgcgtctctgcactgcacgccccagggagactggagccctgaagcccctagatgtacagtgaaatcctgtgatgacttcctggaccaactccctaatggtcgggtgctctttccactaaatttccagcttggggcagaagtgtccttcatttgtgatgaggggttccgattaaaaggcagctccactagtcgttgtgtcttggttggaatgaaaagcctttggagcagcagtgttcctgtgtgtgagcaaatcttttgtccaaatcctccggctatccttaacgggcgccacacaggaacttctctgggagacattccctatggaaaagaaattacttacacatgtgacccgcacccagtcagagggatgaccttcaacctcgtcggggagagcaccatccgctgcacaagtgacagtcaagggaatgggttctggagcagccctgcccctcgctgtgaaccttctggttctgctgcatgcccacatccacccaagatccacaatgggcataagattggaggacgtgcatctccatatcttcctgggatgactgtcacctacacttgtgacccaggctacctgttggtgggaaacgccttcattttctgtacacacctgggaacctggagccagtctgatcattattgcaaagaggtaaaatgtagcctcccacagtttatgaatggaatccagaaggagatgaaaattaaaaacatctatcactatggagataatgtaactttggagtgtgaagatggatatagtctgaaaggcagtccccagagccagtgccaggcagataacacatgggaccctcctctggccatatgtacatctcgcccacgtgatgctctcatagttggcactttatctggtacgatcttctttattttactcatcattttcctctcttggataattctaaagcacagaaaaggcaataatgcacatgaaaaccctaaagaagtggctatccatttacattctcaaggaggcagcagcgttcatccccgaactctgcaaacaaatgaagaaaatagcagggtccttccttgacaaagtactatacagctgaagaacatctcgaatacaattttggtgggaaaggagccaattgatttcaacagaatcagatctgagcttcataaagtctttgaagtgacttcacagagacgcagacatgtgcacttgaagatgctgccccttccctggtacctagcaaagctcctgcctctttgtgtgcgtcactgtgaaacccccacccttctgcctcgtgctaaacgcacacagtatctagtcaggggaaaagactgcatttaggagatagaaaatagtttggattacttaaaggaataaggtgttgcctggaatttctggtttgtaaggtggtcactgttcttttttaaaatatttgtaatatggaatgggctcagtaagaagagcttggaaaatgcagaaagttatgaaaaataagtcacttataattatgctacctactgataaccactcctaatattttgattcattttctgcctatcttctttcacatatgtgtttttttacatacgtacttttccccccttagtttgtttccttttattttatagagcagaaccctagtcttttaaacagtttagagtgaaatatatgctatatcagtttttactttctctagggagaaaaattaatttactagaaaggcatgaaatgatcatgggaagagtggttaagactactgaagagaaatatttggaaaataagatttcgatatcttctttttttttgagatggagtctggctctgtctcccaggctggagtgcagtggcgtaatctcggctcactgcaacgtccgcctcccg

SEQ ID NO: 86 - DNA, 6120 bp, Homo sapien
  exon (1)..(6120)
atgggggcctcttctccaagaagcccggagcctgtcgggccgccggcgcccggtctccccttctgctgcggaggatccctgctggcggttgtggtgctgcttgcgctgccggtggcctggggtcaatgcaatgccccagaatggcttccatttgccaggcctaccaacctaactgatgagtttgagtttcccattgggacatatctgaactatgaatgccgccctggttattccggaagaccgttttctatcatctgcctaaaaaactcagtctggactggtgctaaggacaggtgcagacgtaaatcatgtcgtaatcctccagatcctgtgaatggcatggtgcatgtgatcaaaggcatccagttcggatcccaaattaaatattcttgtactaaaggataccgactcattggttcctcgtctgccacatgcatcatctcaggtgatactgtcatttgggataatgaaacacctatttgtgacagaattccttgtgggctaccccccaccatcaccaatggagatttcattagcaccaacagagagaattttcactatggatcagtggtgacctaccgctgcaatcctggaagcggagggagaaaggtgtttgagcttgtgggtgagccctccatatactgcaccagcaatgacgatcaagtgggcatctggagcggccccgcccctcagtgcattatacctaacaaatgcacgcctccaaatgtggaaaatggaatattggtatctgacaacagaagcttattttccttaaatgaagttgtggagtttaggtgtcagcctggctttgtcatgaaaggaccccgccgtgtgaagtgccaggccctgaacaaatgggagccggagctaccaagctgctccagggtatgtcagccacctccagatgtcctgcatgctgagcgtacccaaagggacaaggacaacttttcacctgggcaggaagtgttctacagctgtgagcccggctacgacctcagaggggctgcgtctatgcgctgcacaccccagggagactggagccctgcagcccccacatgtgaagtgaaatcctgtgatgacttcatgggccaacttcttaatggccgtgtgctatttccagtaaatctccagcttggagcaaaagtggattttgtttgtgatgaaggatttcaattaaaaggcagctctgctagttactgtgtcttggctggaatggaaagcctttggaatagcagtgttccagtgtgtgaacaaatcttttgtccaagtcctccagttattcctaatgggagacacacaggaaaacctctggaagtctttccctttggaaaagcagtaaattacacatgcgacccccacccagacagagggacgagcttcgacctcattggagagagcaccatccgctgcacaagtgaccctcaagggaatggggtttggagcagccctgcccctcgctgtggaattctgggtcactgtcaagccccagatcattttctgtttgccaagttgaaaacccaaaccaatgcatctgactttcccattgggacatctttaaagtacgaatgccgtcctgagtactacgggaggccattctctatcacatgtctagataacctggtctggtcaagtcccaaagatgtctgtaaacgtaaatcatgtaaaactcctccagatccagtgaatggcatggtgcatgtgatcacagacatccaggttggatccagaatcaactattcttgtactacagggcaccgactcattggtcactcatctgctgaatgtatcctctcgggcaatgctgcccattggagcacgaagccgccaatttgtcaacgaattccttgtgggctaccccccaccatcgccaatggagatttcattagcaccaacagagagaattttcactatggatcagtggtgacctaccgctgcaatcctggaagcggagggagaaaggtgtttgagcttgtgggtgagccctccatatactgcaccagcaatgacgatcaagtgggcatctggagcggcccggcccctcagtgcattatacctaacaaatgcacgcctccaaatgtggaaaatggaatattggtatctgacaacagaagcttattttccttaaatgaagttgtggagtttaggtgtcagcctggctttgtcatgaaaggaccccgccgtgtgaagtgccaggccctgaacaaatgggagccggagctaccaagctgctccagggtatgtcagccacctccagatgtcctgcatgctgagcgtacccaaagggacaaggacaacttttcacccgggcaggaagtgttctacagctgtgagcccggctatgacctcagaggggctgcgtctatgcgctgcacaccccagggagactggagccctgcagcccccacatgtgaagtgaaatcctgtgatgacttcatgggccaacttcttaatggccgtgtgctatttccagtaaatctccagcttggagcaaaagtggattttgtttgtgatgaaggatttcaattaaaaggcagctctgctagttattgtgtcttggctggaatggaaagcctttggaatagcagtgttccagtgtgtgaacaaatcttttgtccaagtcctccagttattcctaatgggagacacacaggaaaacctctggaagtctttccctttggaaaagcagtaaattacacatgcgacccccacccagacagagggacgagcttcgacctcattggagagagcaccatccgctgcacaagtgaccctcaagggaatggggtttggagcagccctgcccctcgctgtggaattctgggtcactgtcaagccccagatcattttctgtttgccaagttgaaaacccaaaccaatgcatctgactttcccattgggacatctttaaagtacgaatgccgtcctgagtactacgggaggccattctctatcacatgtctagataacctggtctggtcaagtcccaaagatgtctgtaaacgtaaatcatgtaaaactcctccagatccagtgaatggcatggtgcatgtgatcacagacatccaggttggatccagaatcaactattcttgtactacagggcaccgactcattggtcactcatctgctgaatgtatcctctcaggcaatactgcccattggagcacgaagccgccaatttgtcaacgaattccttgtgggctacccccaaccatcgccaatggagatttcattagcaccaacagagagaattttcactatggatcagtggtgacctaccgctgcaatcttggaagcagagggagaaaggtgtttgagcttgtgggtgagccctccatatactgcaccagcaatgacgatcaagtgggcatctggagcggccccgcccctcagtgcattatacctaacaaatgcacgcctccaaatgtggaaaatggaatattggtatctgacaacagaagcttattttccttaaatgaagttgtggagtttaggtgtcagcctggctttgtcatgaaaggaccccgccgtgtgaagtgccaggccctgaacaaatgggagccagagttaccaagctgctccagggtgtgtcagccgcctccagaaatcctgcatggtgagcataccccaagccatcaggacaacttttcacctgggcaggaagtgttctacagctgtgagcctggctatgacctcagaggggctgcgtctctgcactgcacaccccagggagactggagccctgaagccccgagatgtgcagtgaaatcctgtgatgacttcttgggtcaactccctcatggccgtgtgctatttccacttaatctccagcttggggcaaaggtgtcctttgtctgtgatgaagggtttcgcttaaagggcagttccgttagtcattgtgtcttggttggaatgagaagcctttggaataacagtgttcctgtgtgtgaacatatcttttgtccaaatcctccagctatccttaatgggagacacacaggaactccctctggagatattccctatggaaaagaaatatcttacacatgtgacccccacccagacagagggatgaccttcaacctcattggggagagcaccatccgctgcacaagtgaccctcatgggaatggggtttggagcagccctgcccctcgctgtgaactttctgttcgtgctggtcactgtaaaaccccagagcagtttccatttgccagtcctacgatcccaattaatgactttgagtttccagtcgggacatctttgaattatgaatgccgtcctgggtattttgggaaaatgttctctatctcctgcctagaaaacttggtctggtcaagtgttgaagacaactgtagacgaaaatcatgtggacctccaccagaacccttcaatggaatggtgcatataaacacagatacacagtttggatcaacagttaattattcttgtaatgaagggtttcgactcattggttccccatctactacttgtctcgtctcaggcaataatgtcacatgggataagaaggcacctatttgtgagatcatatcttgtgagccacctccaaccatatccaatggagacttctacagcaacaatagaacatcttttcacaatggaacggtggtaacttaccagtgccacactggaccagatggagaacagctgtttgagcttgtgggagaacggtcaatatattgcaccagcaaagatgatcaagttggtgtttggagcagccctccccctcggtgtatttctactaataaatgcacagctccagaagttgaaaatgcaattagagtaccaggaaacaggagtttcttttccctcactgagatcatcagatttagatgtcagcccgggtttgtcatggtagggtcccacactgtgcagtgccagaccaatggcagatgggggcccaagctgccacactgctccagggtgtgtcagccgcctccagaaatcctgcatggtgagcataccctaagccatcaggacaacttttcacctgggcaggaagtgttctacagctgtgagcccagctatgacctcagaggggctgcgtctctgcactgcacgccccagggagactggagccctgaagcccctagatgtacagtgaaatcctgtgatgacttcctggaccaactccctaatggtcgggtgctctttccactaaatttccagcttggggcagaagtgtccttcatttgtgatgaggggttccgattaaaaggcagctccactagtcgttgtgtcttggttggaatgaaaagcctttggagcagcagtgttcctgtgtgtgagcaaatcttttgtccaaatcctccggctatccttaacgggcgccacacaggaacttctctgggagacattccctatggaaaagaaattacttacacatgtgacccgcacccagtcagagggatgaccttcaacctcgtcggggagagcaccatccgctgcacaagtgacagtcaagggaatgggttctggagcagccctgcccctcgctgtgaaccttctggttctgctgcatgcccacatccacccaagatccacaatgggcataagattggaggacgtgcatctccatatcttcctgggatgactgtcacctacacttgtgacccaggctacctgttggtgggaaacgccttcattttctgtacacacctgggaacctggagccagtctgatcattattgcaaagaggtaaaatgtagcctcccacagtttatgaatggaatccagaaggagatgaaaattaaaaacatctatcactatggagataatgtaactttggagtgtgaagatggatatagtctgaaaggcagtccccagagccagtgccaggcagataacacatgggaccctcctctggccatatgtacatctcgcccacgtgatgctctcatagttggcactttatctggtacgatcttctttattttactcatcattttcctctcttggataattctaaagcacagaaaaggcaataatgcacatgaaaaccctaaagaagtggctatccatttacattctcaaggaggcagcagcgttcatccccgaactctgcaaacaaatgaagaaaatagcagggtccttccttga

SEQ ID NO: 87 - DNA, 2180 bp, Unknown
  v-ral simian leukemia viral oncogene homolog B (ras related; GTP binding protein)
gagctgcgggccgggtgcggacggcggaggcggcgggactggtccctgctcttcagtgggtcatctgtgtgtcacagcctcagaagaccagcgagatggctgccaacaagagtaagggccagagctccttggccctccacaaggtgatcatggttggcagcggaggcgttggcaagtcagccctgacgcttcagttcatgtatgacgagtttgtagaagactatgaacctaccaaagctgacagttatagaaagaaagtggttcttgatggggaagaagttcagatagatattctggacaccgctgggcaagaggactacgcagccattcgagataactactttcggagtggggaagggtttcttcttgtgttctcaatcacagaacatgaatcctttacagcaactgccgaattcagggaacagattctccgtgtgaaggctgaagaagataaaattccactgctcgtcgtgggaaacaagtctgacctagaggagcggaggcaggtgcctgtggaggaggccaggagtaaagccgaagagtggggcgtgcagtacgtggagacgtcagcgaagacccgggccaacgtggacaaggtgttctttgacctaatgagagaaatcagaacaaagaagatgtcagaaaacaaagacaagaatggcaagaaaagcagcaagaacaagaaaagttttaaagaaagatgttgcttactatgagtgtcaaggtgacggatgaagccagctgctcctaaggacacagggctgggttggtaaagagaaggctatggttgacttcttgcttgtgcttcccactctccccgacttcattcactcaaacttctttaaatggggaaaaatatttgtgactcagtggctggcagaagaaataagcccatgcaagtggaagggctgctttgtcaggaggttgtggaatttctttcttctccccttcttccctcccaaaagcttagctatgtataaagtgccacagataggaaacagctgttaattacaaagagaaagaattgtcatagcatcttattttgttcctagttttataacattaccatccttcgttttgaactacagatgttgtagtgggttttggaggagggagtggagtaagatgccctcccacttttatcagtttagtagtagtactgagaaaaatcccttcagctctaagaacactgaaaaatccaccgattttttgggtaagcttcttggcaataccctgtggatctgaaacagctaaaaaaatgaatttgaattgcgccagataggtcaataccaagcttctgattcctcctcacatatgaaaagtgaaagttgtgagttgttttcctcttatttaaacattggcctattataatctgtgttggttatttttctcctgtaagcatcctgatttttctgtaggaacttttctttggcagaccaagtgaagactcaggaatggtgtgcattataaatgacacacattgccacttgtgtagatatttttaagttctttggctaagtcctctcctaactgcctgtcctctggttaggcccctccctctccactagtggtgaatgcatgtgtctgtctgatcagcatcactgcacacggaggtctagtgagcctcttgctaagtgtcacacacactcttcccaaagacgtgatgagttaaagttgtattctgaaatcatgaagccagagcctgtgccagaccttctgctacctctcatagaattgctctgtaattctaaatttaaaattagaagtagagagagataagccatcgcccctttgcctctgagaattggctgctgtttctaatataattattttctaagatagccagatagttagaaaaagattttcattgatgacatatctttaaactttcttgcatcagtattctaaattgagcaaactgaaagattttcatcaggaaaggagcactgtgggaagagcccagtattcacattttttccccatttttcagaagcgacatttcatatataggtgccaaaagtgaatcggggtgcggagagtgggaaccttttgaatttatgattgtcacagagatggtagaaattatgatctgactggaaaacaatcctgtatcccctcccaaagaatcatgggctttttttttgaattaaaaagcagacaaatagaaaaaaaaaaaaaaa

SEQ ID NO: 88 - DNA, 621 bp, Unknown
  v-ral simian leukemia viral oncogene homolog B
  exon (1)..(621)
atggctgccaacaagagtaagggccagagctccttggccctccacaaggtgatcatggttggcagcggaggcgttggcaagtcagccctgacgcttcagttcatgtatgacgagtttgtagaagactatgaacctaccaaagctgacagttatagaaagaaagtggttcttgatggggaagaagttcagatagatattctggacaccgctgggcaagaggactacgcagccattcgagataactactttcggagtggggaagggtttcttcttgtgttctcaatcacagaacatgaatcctttacagcaactgccgaattcagggaacagattctccgtgtgaaggctgaagaagataaaattccactgctcgtcgtgggaaacaagtctgacctagaggagcggaggcaggtgcctgtggaggaggccaggagtaaagccgaagagtggggcgtgcagtacgtggagacgtcagcgaagacccgggccaacgtggacaaggtgttctttgacctaatgagagaaatcagaacaaagaagatgtcagaaaacaaagacaagaatggcaagaaaagcagcaagaacaagaaaagttttaaagaaagatgttgcttactatga

SEQ ID NO: 89 - DNA, 971 bp, Unknown
  No homology
catccctaactttctcttgacccttagttgaagtgtttaggtggcttctggtgatatcctttcataattttatgtcgcttaaaagggtgatggatgtgacacctcatagaagtgagctctgaactctagataaaattaaaagaaatttcatttcttttaaaagaaattaaaagaaaattaaaatttcattttagagaattaaaatatttgtgctcaactgcttgatcttttttctttttgtgtaattgtgtttagttctatgcaattttatcacgtgtagatttgtgtgaccaccacagcaaggtgcggaacagttccatcacacagatcccttgtgctccccttttacagccacagccacagccacctcccttctttaccaccaagccccatcctctggcaaccactcatctgttctccatctctaattttgccatttcaagaatgtcatataaatggaatcatatagtatgtaacctttgagattgacttttttcactcagcataattcccttgaaatccattcaagttgttgcatgtatcaagagtttgttcctttttcttgctcagtagtatttcgtggtatggatgtaccagttttttttaaccattcacctactgaaggacattggggttgttttcagttttgggccattaataataaagctattgttaacattcatgaacaggtttttatgtgaacataaattttcatttgtctgcaataattgcccaagagggcaattgctaggttccatggtaagcacgtgttcatttttgtaagaaactgctactctttttccagagtgactgtgccattttatgttcccactagaaatgtatgaccaatccagtttctctgcatcctcaccagtatttgctatattattatttttttagtcattctgataggtgagtataatgatacctcatggttttaatttgcattttcctaatgggctagtaatgtt

SEQ ID NO: 90 - DNA, 695 bp, Unknown
  No homology
atactaaccgacagaggatgcatccaagtagggaaaagaataaccaaatttgtgcgttaagttctatccttagatgtttaaaggtgaaattctaatctgtaccatttagcctaacaagatatgctttcatatttctgattggtgcctttccactttttagcagcaatgaaagccacttagttggttatagtcttctgttctgacaacatgtcaagaagataggacaggacaatattttattttgctgatgttttcgttcccaaatgtgactttgtgaaactgaaattctttcatgtcctttccctttcactcatgccaaaacaaccagctcggacatttgtgtttttggtttaaagttcattgatattacaccttgatttatctaaaagttaaaattatttgccttgataaaaggctagtgcaagagcaaatcagctttaaaaacgaggatgttatctgctttccttcatttttgagcctgttattcgacaccatctgtgtaatatagatgagaatgatccggtttaagtaagttttgttataccattgtcataaaccccatcataagccgtttttctgtttaatggaaagaggcatgtggatttatacggattcacttgtaagtgttggattgggaattttttgtgtaaattttctcaaataaaggctagcagaaaccaaaaaaaaaaaaaaaa

SEQ ID NO: 91 - DNA, 950 bp, Unknown
  No homology
cagttttgagtggtctttgaatatgagggggaaagattagcggtaatttcactacatccctttttcctgactttcatgaatttgtcatacatcttctctctgatgcttgactttatttgctccttagcaatagtctgcatttaaagaaaggtgtgttcagttcatcagcttgaaattgactatttcatttttccagaattttttaggagaagagtacccgttttgtttgttttataaaacagatgacaagtctctttaaaagaaacagaagtacagtacttttgaaatacaatgctgttagtttggatttctttttttatatataatattcatacaattatctgatgtttgccttcattaataaagctgttagtttattcaccaaaatgtcaagaatggatgtgcttttctttattccatacatttaaaaatattttagctgctaagatttagttaactttctaagaaacgaattcaagttgccttcagcaggaattgaaagctttcgttccctttctttatatagtcttccgaaaattctgttcaagtgttttctagttaattatgtaacagaatgttagcatctctccaaatcttgaaacttgaattttgagagtgcattgaattatgctttcagtgttaaagtaaaggtttcaattatccttctagtgaagtctattgtggaataccatttcccatggaactgaggccatttccacaactttgcacagaattgcagtcttgttcttccctggatcatgacaaataagtctcacacagtgccgtaatacttgtggattcttttgtaatctttgtaatcttaataagggcattatgagaagatgactccatgtttttttaatatttcaaacacattgggatgtaacaatgaatgtcaactgtaggaatggttgtttcgttttaaggaataaccatgttggggaaagatg

SEQ ID NO: 92 - DNA, 695 bp, Unknown
  No homology
aggtaaacacaatggtgtagttaattaaattctgggtgaatgggagcgggactgattactgtgtcttgctcttcgccctttgtttttttcagaacccaataacagaattgtgtatgtgtgtactgtatctgcctttccaccacatttttatgacactgtattccactgcctgcttttttgacctttgttccctcggatttgtcctataacttagcatctgtggttaacagtgatcctagggctgaccgcacatgacaagtcacaagagaagagcggaagggcaagaattcaaagcatttgttcatacaatgtggcagcctcttttgcatagtcatgtaggatcctgtttgtaatgctatcataaatattctgtagttttgttcccctcccaccccaactggagctatgaaactttttattggattcagtcttgtcttttgtctagaaagaattttatcttgttgacgcatgagctgtttaaaaattattctattaaatgttggttaatagttgtgcagtttttcttttcagaagaaaaggcaattcaaaggttgcctttgttttctgtcaccttccaacccctcagcacttctagtcagatacagattcatcagtgtatgcaacatcctttgtaatttaaaataaaaaaaaaaaaaaaaaaaaaaaaaaaaaaaaaaaaaaaaaaaaaaaaaaaa

SEQ ID NO: 93 - DNA, 3025 bp, Unknown
  Transmembrane protein 23
caaaaatgaggtgaattaatacttgggcgctcaggaaccctggacagctacatgaggtgtttaaaaactgccctgaccatcttgccaaacaagtctctgctcatgaggccccacaggatgaacgagccgaggcaggacagtgtcctgccctgtcggaacagtgactgctgacctgccaagagagagctggggactgcctgctgtctgccagtacaatgaaggaagtggtttattggtcacccaagaaggtggcagactggctgctggagaatgctatgccagaatactgtgagcctctggagcatttcacaggccaggacttgatcaacctaacccaagaggatttcaaaaaaccccccttgtgccgagtctcctctgacaacgggcagcggctcctggacatgatagaaaccctgaaaatggagcaccatttggaagcacacaagaacggccatgccaatgggcacctcaacattggcgtagacatccccacccccgacggcagcttcagcatcaagattaaacccaacgggatgccaaatgggtataggaaagagatgataaagatccccatgccagaactggagcgctctcagtaccccatggagtggggcaagacttttctggcctttctttatgcactttcctgtttcgttctcaccacagtgatgatctcggtcgtccacgaacgagtacctcctaaggaggtgcagcctccactaccggacacattttttgaccattttaaccgggtgcagtgggccttttctatttgtgaaattaatggcatgatccttgtaggactctggttaattcagtggctgctcttaaaatacaagtctattattagcagaagatttttctgcatagttggcacgctgtacctgtatcggtgtattacaatgtatgtaactacactcccagtacctggtatgcatttcaactgttctccgaagcttttcggagactgggaagcccaactgcgaagaataatgaagctcattgctggaggtggcttgtctatcactggctctcacaacatgtgtggggactatctgtacagcggccacacggtcatgctaacacttacctacttatttatcaaagagtattcccctcggcgactctggtggtatcactggatttgctggcttctcagcgtagttggaatcttctgtattctcttagcgcatgaccactacactgtggacgtggtggtggcatattacatcaccacgagactcttctggtggtatcacactatggccaatcagcaagtgctaaaggaagcttcccagatgaacctcctggccagggtgtggtggtacaggccatttcagtactttgaaaagaatgtccaaggaatcgtacctcgatcttaccattggcccttcccctggccagtagtgcaccttggtaggcaagttaaatacagccggttggtgaatgacacataacagctgtacaaagtgggggaaagaggaactgtcccaagtgctaagaactccatgagagaagatgccataaaataaacacctccctaatcctattatctttcagcggttaccttgacttaacctattgagttacctggtcagcactgtgatctttttttctctccaaaggacctgcgttggacaacaataaagaaaatttaacctatcatgcactgtatacatttcctgttcataagtttgggatttacataacccgcagccaccatgttcctttgtatatgatgcaacagcgtaaatgtaagcttttatatcataagttctggtctttccagtcacatctggaaataagcgtattattttcttgggaaaacatacttttcatatctcttgccccaaagattgggctgtaagccattttctagcaaatgtctctatgaaggtttctaagtacctgaatggggttcgattctgaaatctttctacttgttgcaccgatattcaaataaaaatgacagacacagaaaggtttggtaactttgggttttgtaaaatcagcagagacagtgtgtcaaaaagtgcaaaaaaaaagattctgttataaagtgattttctaagtatttcctagctttatttttcaaaatgatgttatgaaaaccaaatttgaagatttttacatgtcaaagagaagagggttaaaatttaaaaatgcttcttgggagagaaatttgtctatgtttctagtgcctttcttgtcttgattgtatggtcagtaggcaatcttaaatgtttttatttaaaataaagtattccatgaaaatataactgtatgtatacactactaaattttgcatttatagctaaattgaatcagaagactgcttatggttttaaaattgcaatgacttaaataatgaggttgttaattagagtcagagcctgttcacatattgtgatcaggtagcaatgacatgtaccacttaaattattttatcgtcgatttggtagttcgattttaactactcaatgaaaacagccatgaatatcttttcttaaagagagttttgaaaatgatcacttaactaaaacttgaaagctataaattagttatccatactctcatgacaattttgttggtgaacaacaaaaagagatctatttctttaaaatatatttgtgcagaaactgcatgtaattctaagttttactcctaacataagtatgtttggggaagtattctattctatacttgccaatgtggagaacaaaatagttttttaagaatgaagaagtatatatatccattctgtattttacgtgcagcagaattatcttccgtagggtttttttgtgtattcacaaggtgatatttgtattgtacaacaataatggtgaaggaaataaaaaggcttttaaaattttgtttgttttaaatctttgtaaagttactattccagagagtatactgatatcttaacagcttacctagatcataaattaatcaaaatgcactttttaataaaaactgatacttaaaataaatggctcttatttctaaaaaaaaaaaaaaa

SEQ ID NO: 94 - DNA, 1242 bp, Unknown
  Transmembrane protein 23
  exon (1)..(1242)
atgaaggaagtggtttattggtcacccaagaaggtggcagactggctgctggagaatgctatgccagaatactgtgagcctctggagcatttcacaggccaggacttgatcaacctaacccaagaggatttcaaaaaaccccccttgtgccgagtctcctctgacaacgggcagcggctcctggacatgatagaaaccctgaaaatggagcaccatttggaagcacacaagaacggccatgccaatgggcacctcaacattggcgtagacatccccacccccgacggcagcttcagcatcaagattaaacccaacgggatgccaaatgggtataggaaagagatgataaagatccccatgccagaactggagcgctctcagtaccccatggagtggggcaagacttttctggcctttctttatgcactttcctgtttcgttctcaccacagtgatgatctcggtcgtccacgaacgagtacctcctaaggaggtgcagcctccactaccggacacattttttgaccattttaaccgggtgcagtgggccttttctatttgtgaaattaatggcatgatccttgtaggactctggttaattcagtggctgctcttaaaatacaagtctattattagcagaagatttttctgcatagttggcacgctgtacctgtatcggtgtattacaatgtatgtaactacactcccagtacctggtatgcatttcaactgttctccgaagcttttcggagactgggaagcccaactgcgaagaataatgaagctcattgctggaggtggcttgtctatcactggctctcacaacatgtgtggggactatctgtacagcggccacacggtcatgctaacacttacctacttatttatcaaagagtattcccctcggcgactctggtggtatcactggatttgctggcttctcagcgtagttggaatcttctgtattctcttagcgcatgaccactacactgtggacgtggtggtggcatattacatcaccacgagactcttctggtggtatcacactatggccaatcagcaagtgctaaaggaagcttcccagatgaacctcctggccagggtgtggtggtacaggccatttcagtactttgaaaagaatgtccaaggaatcgtacctcgatcttaccattggcccttcccctggccagtagtgcaccttggtaggcaagttaaatacagccggttggtgaatgacacataa

SEQ ID NO: 95 - DNA, 784 bp, Unknown
  No homology
aggttccaagagggggagcccatccacctgaggtgccacaagttgcaaagcaagcgtctgttcaggatcacattcttccagaatggaaaatccctgacgtttttccataacacttccaccttctccatcctacgagcaaaccgcaaccacagtggcgagtaccgctgctcaggaactatagatcggatgcagctctcgtcacagcctgtgaagatcactgtccaaggtccggcaactgtattcttctttctacattggtttcaaatcgctttctgcctggtgatgggactcctgtttgcagtggatacagggctgtatgtttctgtgcagagagaccttccaagatcagtgggagatgggaagaattgcaacgtgagatggagccagagccctgaaaacaaatgaggtctgggccaaggagactccaaccacccttgtgacctgtgatcttcagagctaaatgccaacaggccacaccctgactgagctcctgaaggtcaaggcacagtccagcccacctagcttgacaaggactcacagcaaatgtgttttcatagcccctaaacagaggctcctcaaatctagaaaaactcagtaaatcctgcctctcctttcaatcaatccagcaatctgagcgcttctcaggactgtactaccagcacctcggtccaagccagcatcatgtctcacttgggttactgcagtagctccctgacgggtctccctacactcaccctgccaccctacagtcgattctcaccacaccggccaaagtgatcttttt

SEQ ID NO: 96 - DNA, 629 bp, Unknown
  No homology
taaacagaggctcctcaaatctagaaaaactcagtaaatcctgcctctcctttcaatcaatccagcaatctgagcgcttctcaggactgtactaccagcacctcggtccaagccagcatcatgtctcacttgggttactgcagtagctccctgacgggtctccctacactcaccctgccaccctacagtcgattctcaccacaccggccaaagtgatctttttaagatgtgtgttgtctctttcccttccttgctcaaagccatgccagagctcccccttgcaattaagaggaaagctaagacctttggaacgttctactaggcgctacatgatcttgctcctcactgcctctctgacctcatctcctgctcttccttgcttcctttaacacacgaattctacttctgcctagggcttatgctatttcctgtttctggaaggttctttcttacagatatctacatcgtacttcattatgatctttcctcaagtgtcaccttatcagtgaggtctccttgatcctttagtataagcccagtctcccaccatcccctaatccccttgtttaattgtttaattgacaattgtttaataaacaatctcttgtgtaaaaaaaaaaaaaaaaaaa

SEQ ID NO: 97 - DNA, 2631 bp, Unknown
  Ubiquitin conjugating enzyme E2B
cgtccctctttctccaccccgccgagcctaaactagtgacggggagggagacgggatagtgtttctgtttcgtggtctttgaatccacaacctctagtctgaacacagagaacacaaatttgtctattacttcaggaagcccagggggaaccgcgccccgctgaagggctcggggaaggcgcgctcccgcgtcccgccccctcctcccccagcactcacactgtggtagcggcggagggcggagggatccggaggcggcggagggagacgtcattgcagggttgtttgtcagtctcggcggcggcggcggcggcggcggcggcggcgatccacagtgattcggccgccgcgccggggggtgggggggctgcgcgggactttttttttttcagactgaccgcggggcagctgcggagcatgtcgaccccggcccggaggaggctcatgcgggatttcaagcggttacaagaggacccacctgtgggtgtcagtggcgcaccatctgaaaacaacatcatgcagtggaatgcagttatatttggaccagaagggacaccttttgaagatggtacttttaaactagtaatagaattttctgaagaatatccaaataaaccaccaactgttaggtttttatccaaaatgtttcatccaaatgtgtatgctgatggtagcatatgtttagatatccttcagaatcgatggagtccaacatatgatgtatcttctatcttaacatcaattcagtctctgctggatgaaccgaatcctaacagtccagccaatagccaggcagcacagctttatcaggaaaacaaacgagaatatgagaaaagagtttcggccattgttgaacaaagctggaatgattcataatagacaactggtctgttaatctttttcatcattgttgtgtataatttacctctcattagaaaggctaacaaattttaagtgccacaggttttaaggattctgcagaaaaaaaagaaaaaagtccttcagtttagaacctacaaaagcttgtgtatcttgattaatgtactttttattgcatggtgtgaactaagttattgctgcataaatttgtaatatatcctgtttgtatttttttccaagtgtataatgttggtgtggagttttcatgacagaatatacacattttgtaaatctgtacttttttcaaatattgaatgccttatttttgaattctttagatttttaaattggagaaaagcacttaaagttttttatatatgaatattacatgtaaagctgttaaaatacataacttcagtgcaagagactttgtcacttatttccttatgtgtgtaggaggggttaataagtctctagctctccatctattgatagtttcatttacaatttcaaaagaacattcttatattttatcaaggaagtcttcaaatttgattctaaatagcgattataatctccaactttattttgaatgtacctctattagtttcaattgagtaattctagacataactggtttgactctgtccaactctgtatttaggccatttgttacagtttcttcatgcattacttactgttaaaactgtaccttttgcgatttcacagttggcacttctgccatgagcagagaactgatgcgacttgttttgctgcttggtagcactttaaaaaattttttgattaatgaagaaagtaaaaccataaacatttgccaaaaattcatgccccagtattagcaatgaattagttgcattggtttgagaaaggcacatattggagggaaatcttggtgtaacttaaatatttgaaaattacctttaatgcaatgcatatctgtttattctgggaaatgttttaatgccagggcctgctgagttgcttcttcttgtggagattttttttttaatctcctgagttgtataaaagttgtactgcatcttagtttactggataaatttaaaacacagtattgtagaaagctaatacaaaactatcctatgccttcaaatagtatagaaaatggaaaatatacaagtaaattctgttgaaccacctgtgtagtctctctagtagttaaaacagctattttagtaaccccaagagtttcttctcatatccataaaattggattacagtatggcaatatctacagcttctattcattatgcaacgtttaacattgattggataaatgcttataggctgggccaggtggctcccacctgtagtcccagcactttgggaggcaaaggcgggaggatcacttgaggccaggactttgagaccagccagggcaacataataagacttttctctactttaaattttttaaaaaattagttgggcatagtggcacttgcctgtagtctcagctacttaggaggctgaggtggcagaatagcttatgcctaggaggttgaggctgcagtgagctgtgattatgccattgcactccagcctgggtgacagagcaataccctgtctttaaaaataaaagctattacttggcaaattctgaggtaagtgtatgatcttagggaactttgatacaaatgggaattcactcactggaatcgtggctcccaaaaagatgctttaattgtgtggtgcttttatagtttagctcca

SEQ ID NO: 98 - DNA, 459 bp, Unknown
  Ubiquitin-conjugating enzyme E2B
  exon (1)..(459)
atgtcgaccccggcccggaggaggctcatgcgggatttcaagcggttacaagaggacccacctgtgggtgtcagtggcgcaccatctgaaaacaacatcatgcagtggaatgcagttatatttggaccagaagggacaccttttgaagatggtacttttaaactagtaatagaattttctgaagaatatccaaataaaccaccaactgttaggtttttatccaaaatgtttcatccaaatgtgtatgctgatggtagcatatgtttagatatccttcagaatcgatggagtccaacatatgatgtatcttctatcttaacatcaattcagtctctgctggatgaaccgaatcctaacagtccagccaatagccaggcagcacagctttatcaggaaaacaaacgagaatatgagaaaagagtttcggccattgttgaacaaagctggaatgattcataa

SEQ ID NO: 99 - DNA, 1859 bp, Homo sapiens
  misc_feature (1210)..(1210): n is a, c, g, or t
cggccgctgaggctgcggcggcgcgaaggcggcgggcatggtgggacgggagaaggagctcgccatccactttgttcccgggaactgccggctcgaagaggaggaagtgaacatccccagcaggcgggttctggttactggtgccactgggcttcttggcagagctgtgtacagagaatttaagcagaataattggcatgcctttggctgtggttatagaagagcgaggccaaagtttgagcaggtcaatctgttggactccgatgcggttcgtcacattgttcatgacgttcagccccacgtcatagtgcattgtgcagcagagagaaggcccgatgtggtggaaaatcagccggatgctgcttctcgacttaatgtggatgcttctcggaatttagcaaaggaagcagctgcaatcggagcatttctaatctacattagctcagattatgtatttgatggaacaaatccaccttatagggaggaagacataccaagtcccctaaacctgtatggcaaaaccaaattagaaggagaaaaggccgtcctggagaacaatttaggagctgctgttttgagaattcctgttctgtatggagaagttgagaagcttgaagaaagtgccgtgactattatgtttgataaagtgcagttcagcaacaagtcagcgaacatggaccactggcagcagaggttccccacccatgtcaaagatgtagccaccgtgtgtcgtcagttagccgagaagagaatgctggatccgtcaattaagggaacctttcattggtctggcaacgaacagatgactaagtatgaaatggcatgtgccattgccgatgccttcaacctccccagcagtcacttaagacctataactgacagccctgtcctaggagcacaacgtccgagaaatgctcagcttgactgctccaaattggagatcttgggcattggccaacgaacaccatttcgaattggaatcaaagaatcactttggcctttcctcattgacaagagatggagacaaacggtctttcattagtttatttgtgttgggttctttttttttttttaaatgaaaagtatagtatgtggcactttttaaagaaaaggaaatagttttgtatgagtgctctttaattgtgactcatgatctttcaggtaaatgatgctcttgcgctagtgaaatggtctaaagaaactaagggcnataatgccttgtttcggaagtaacagtttttctgtttatcattttgtttgttctggcttaactcgctgtttgcgtatagtaaattatgattctgaaatatttgagagccaagttgaaacagatctgctgtagacttttcagatgaaattgttcattctcgtaacctccatattttcaggatttttgaagctgttgaccttttcatgttgattattttaaattgtgttaaatagtatgaaaatcattggtgttcattatttgctttgcctgagctcagatcaaaatgtttgaagaaagatactttatttttgcaacttaagtgaggtttttatgctcgagatctttcgatgtgttatgtatattggaactcctgcagcttcgcgcctcctgcttttgtagcagtgtatggtgagcacttgagagagcgtgtgtacatgtattttttttctaggcaaacattgaatgcaaacgtgtatttttttaatatatatataaaactgtccttttcactccatgtcacactaagtgatatttcatatgtgtggttatactaataattggccttgtaagtcttttgaccattcatgaataataataataaatacgtactgctggcatgaaaaaaaaaaaaaaaaaaaaaaaaaaaaaa

SEQ ID NO: 100 - DNA, 1005 bp, Homo sapien
  exon (1)..(1005)
atggtgggacgggagaaggagctcgccatccactttgttcccgggaactgccggctcgaagaggaggaagtgaacatccccagcaggcgggttctggttactggtgccactgggcttcttggcagagctgtgtacagagaatttaagcagaataattggcatgcctttggctgtggttatagaagagcgaggccaaagtttgagcaggtcaatctgttggactccgatgcggttcgtcacattgttcatgacgttcagccccacgtcatagtgcattgtgcagcagagagaaggcccgatgtggtggaaaatcagccggatgctgcttctcgacttaatgtggatgcttctcggaatttagcaaaggaagcagctgcaatcggagcatttctaatctacattagctcagattatgtatttgatggaacaaatccaccttatagggaggaagacataccaagtcccctaaacctgtatggcaaaaccaaattagaaggagaaaaggccgtcctggagaacaatttaggagctgctgttttgagaattcctgttctgtatggagaagttgagaagcttgaagaaagtgccgtgactattatgtttgataaagtgcagttcagcaacaagtcagcgaacatggaccactggcagcagaggttccccacccatgtcaaagatgtagccaccgtgtgtcgtcagttagccgagaagagaatgctggatccgtcaattaagggaacctttcattggtctggcaacgaacagatgactaagtatgaaatggcatgtgccattgccgatgccttcaacctccccagcagtcacttaagacctataactgacagccctgtcctaggagcacaacgtccgagaaatgctcagcttgactgctccaaattggagatcttgggcattggccaacgaacaccatttcgaattggaatcaaagaatcactttggcctttcctcattgacaagagatggagacaaacggtctttcattag

SEQ ID NO: 101 - DNA, 1426 bp, Unknown
  Polymeric immunoglobulin receptor 3 precursor
ggtgcgaccaagccctggctccagctctagcgggtatctgcccaccatggccctggtgctgatcctccagctgctgaccctctggcctctgtgtcacacagacatcactccgtctgtccccccagcttcataccaccctaagccatggctgggagctcagccggctacagttgtgacccctggggtcaacgtgaccttgagatgccgggcaccccaacccgcttggagatttggacttttcaagcctggagagatcgctccccttctcttccgggatgtgtcctccgagctggcagaattctttctggaggaggtgactccagcccaagggggaagttaccgctgctgctaccgaaggccagactgggggccgggtgtctggtcccagcccagcgatgtcctggagctgctggtgacagaggagctgccgcggccgtcgctggtggcgctgcccgggccggtggtgggtcctggcgccaacgtgagcctgcgctgcgcgggccgcctgcggaacatgaacttcgtgctgtaccgcgagggcgtggcggccccgctgcagtaccgccactccgcgcagccctgggccgacttcacgctgctgggcgcccgcgcccccggcacctacagctgctactatcacacgccctccgcgccctacgtgctgtcgcagcgcagcgaggtgctggtcatcagctgggaagactctggctcctccgactacacccgggggaacctagtccgcctggggctggccgggctggtcctcatctccctgggcgcgctggtcacttttgactggcgcagtcagaaccgcgctcctgctggtatccgcccctgagccccaggagcactgcagcccgagacttccaacctgagtggcggagaagctgggaccctgggctggactgtcctttcctgcagccccacagtcctgctggctgagctccgcggaacggtccttagaccccgctgtgccctgtgctgtagcttctttccaggcctttcccaaggagtagctgaaaggaagacgcgattagtggttaagacttccaagccagaagacagagggttcgaatcccagcactgccgtctactcactgtagtagtagcagctacagaaaggtagtagtgagacgtgaagccagctggacttcctgggttgaatggggacctggagaacttttctgtcttacaagaggattgtaaaatggaccaatcagcactctgtaagatggaccaatcagcgctctgtaaaatggaccaatcagcaggacacgggcggggacaataagggaataaaagctggcgagcgcggcaccccaccagagtctgcttccacgttgtgggagctttgttctcttgctctacacaataaatcttgctgctgcttaaaaaaaaaaaaaaaaaaaaaaaaaaaaaaaaaaaa

SEQ ID NO: 102 - DNA, 792 bp, Unknown
  Polymeric immunoglobulin receptor 3 precursor
  exon (1)..(792)
atggccctggtgctgatcctccagctgctgaccctctggcctctgtgtcacacagacatcactccgtctgtccccccagcttcataccaccctaagccatggctgggagctcagccggctacagttgtgacccctggggtcaacgtgaccttgagatgccgggcaccccaacccgcttggagatttggacttttcaagcctggagagatcgctccccttctcttccgggatgtgtcctccgagctggcagaattctttctggaggaggtgactccagcccaagggggaagttaccgctgctgctaccgaaggccagactgggggccgggtgtctggtcccagcccagcgatgtcctggagctgctggtgacagaggagctgccgcggccgtcgctggtggcgctgcccgggccggtggtgggtcctggcgccaacgtgagcctgcgctgcgcgggccgcctgcggaacatgaacttcgtgctgtaccgcgagggcgtggcggccccgctgcagtaccgccactccgcgcagccctgggccgacttcacgctgctgggcgcccgcgcccccggcacctacagctgctactatcacacgccctccgcgccctacgtgctgtcgcagcgcagcgaggtgctggtcatcagctgggaagactctggctcctccgactacacccgggggaacctagtccgcctggggctggccgggctggtcctcatctccctgggcgcgctggtcacttttgactggcgcagtcagaaccgcgctcctgctggtatccgcccctga

SEQ ID NO: 103 - DNA, 1830 bp, Homo sapiens
cgcagaggaaggtcgcggccgtggagcgatgacccgcggcggtccgggcgggcgcccggggctgccacagccgccgccgcttctgctgctgctgctgctgccgctgttgttagtcaccgcggagccgccgaaacctgcaggagtctactatgcaactgcatactggatgcctgctgaaaagacagtacaagtcaaaaatgtaatggacaagaatggggacgcctatggcttttacaataactctgtgaaaaccacaggctggggcatcctggagatcagagctggctatggctctcaaaccctgagcaatgagatcatcatgtttgtggctggctttttggagggttacctcactgccccacacatgaatgaccactacacaaacctctacccacagctgatcacgaaaccttccatcatggataaagtgcaggattttatggcgaagcaagatcagtggacccggagtaagatcaaagattacaaggatgacccgttttggagacatatgggctatgttatggcacaattagatgggctgtatgtaggagcaatgaagagggcttcattagaagggataaagcccatgaccatgttccagattcagttcctgaatgctgttggagatctgttggatctgattccctcactttctcccacacaagtctacaatttgaagttttttaagagatgggatatgggacattgctctgctcttattaaggttcttcctggatttgagaacatcttttttgctcattcaagctggtacacgtatgcagccatgctcaggatatataaacactgggacttcaacatcagagataaagacaccatcagtaatcgcctctctttcagcagttacccagggtttttggagtctctggatgacttttacattcttagcagtgggttgatattgctgcagaccacaaacagtgtgtataataagaccctgctgaagcttgtggtaccccagtctctcctagcctggcaaagagtccgtgtggccaatatgatggcaaatggtggcagggagtgggcagagatcttttcaaaatacaactctggcacctataacaatcagtacatgatcttggacctgaagaaggtaaacgtgaggcacagccttgacaaaggcactctgtacattgtggagcaaattcctacatatgtagaattttctgaacaaactgatgttctacggaaaggatattggccctcctacaacattcctttccatgaaaaaatctacaactggagtggctacccaatgctggttcagaagctgggtttggacttctcttatgatctggctccacgagccaaaatcttccggcgcgaccaagggaaagtgactgatgtggagtccatgaaatatatcatgcgatacaacaattatgagaaggatccttacagtaggggcgatccctgcaacaccatctgctgccgtgaggacctgaactcacagaacccgagtcctggaggctgctacgatacgaaggtggcagatatctatctagcatcaaagtacacagcctatgccattagtggtcccaccgtacaaggtggtctccctgtttttcactggaaccggttcaacaaaactctccatgagggcatgccagaggcctacaactttgattttattaccatgaaaccaatcttgaaaccttacgtaaaatgaaggaaggagatgagggaatggaaggctgcaaataagataccaaggcactattttagttacgttttttcccatcagaattatgcaataaaatatattaatttgtcactttaaaaaaaaaaaaaaaaaaaaaaaaaaaaaaaaaa

SEQ ID NO: 104 - DNA, 1659 bp, Homo sapien
  exon (1)..(1659)
atgacccgcggcggtccgggcgggcgcccggggctgccacagccgccgccgcttctgctgctgctgctgctgccgctgttgttagtcaccgcggagccgccgaaacctgcaggagtctactatgcaactgcatactggatgcctgctgaaaagacagtacaagtcaaaaatgtaatggacaagaatggggacgcctatggcttttacaataactctgtgaaaaccacaggctggggcatcctggagatcagagctggctatggctctcaaaccctgagcaatgagatcatcatgtttgtggctggctttttggagggttacctcactgccccacacatgaatgaccactacacaaacctctacccacagctgatcacgaaaccttccatcatggataaagtgcaggattttatggcgaagcaagatcagtggacccggagtaagatcaaagattacaaggatgacccgttttggagacatatgggctatgttatggcacaattagatgggctgtatgtaggagcaatgaagagggcttcattagaagggataaagcccatgaccatgttccagattcagttcctgaatgctgttggagatctgttggatctgattccctcactttctcccacacaagtctacaatttgaagttttttaagagatgggatatgggacattgctctgctcttattaaggttcttcctggatttgagaacatcttttttgctcattcaagctggtacacgtatgcagccatgctcaggatatataaacactgggacttcaacatcagagataaagacaccatcagtaatcgcctctctttcagcagttacccagggtttttggagtctctggatgacttttacattcttagcagtgggttgatattgctgcagaccacaaacagtgtgtataataagaccctgctgaagcttgtggtaccccagtctctcctagcctggcaaagagtccgtgtggccaatatgatggcaaatggtggcagggagtgggcagagatcttttcaaaatacaactctggcacctataacaatcagtacatgatcttggacctgaagaaggtaaacgtgaggcacagccttgacaaaggcactctgtacattgtggagcaaattcctacatatgtagaattttctgaacaaactgatgttctacggaaaggatattggccctcctacaacattcctttccatgaaaaaatctacaactggagtggctacccaatgctggttcagaagctgggtttggacttctcttatgatctggctccacgagccaaaatcttccggcgcgaccaagggaaagtgactgatgtggagtccatgaaatatatcatgcgatacaacaattatgagaaggatccttacagtaggggcgatccctgcaacaccatctgctgccgtgaggacctgaactcacagaacccgagtcctggaggctgctacgatacgaaggtggcagatatctatctagcatcaaagtacacagcctatgccattagtggtcccaccgtacaaggtggtctccctgtttttcactggaaccggttcaacaaaactctccatgagggcatgccagaggcctacaactttgattttattaccatgaaaccaatcttgaaaccttacgtaaaatga

SEQ ID NO: 105 - DNA, 1604 bp, Unknown
  TRAF-interacting protein with a forkhead associated domain
gagaggacgtgctctgccagccagtgggaaggcaggccgcgcgcgcgggagcgcgggaggatcggcggctcgcggtcactggtccctggctcggttccccgcaccccggggctcacacttacccgcgcggaggagcagcggccgggtgtccacccccatcctgcgcccagtctcctcgattcccctcgctctgagccgggagagccgaacagctgaagagagttcactgactccccagccccaggtgggccttgtgcacatcatgaccagttttgaagatgctgacacagaagagacagtaacttgtctccagatgacggtttaccatcctggccagttgcagtgtggaatatttcagtcaataagttttaacagagagaaactcccttccagcgaagtggtgaaatttggccgaaattccaacatctgtcattatacttttcaggacaaacaggtttcccgagttcagttttctctgcagctgtttaaaaaattcaacagctcagttctctcctttgaaataaaaaatatgagtaaaaagaccaatctgatcgtggacagcagagagctgggctacctaaataaaatggacctgccatacaggtgcatggtcagattcggagagtatcagtttctgatggagaaggaagatggcgagtcattggaattttttgagactcaatttattttatctccaagatcactcttgcaagaaaacaactggccaccacacaggcccataccggagtatggcacttactcgctctgctcctcccaaagcagttctccgacagaaatggatgaaaatgagtcatgaacacagaaagtctaagaggagaaatatgatggatgaagagctctgtagatgctgtatagacactaaataagagttgattagggtagtatattatagtcatctgttatgctgtgaaatttggaattcaaaattttgaagtctgtaaattgtgttagtcattaacttagtcacctgttgtattctggatctacacaaaattattttaagtgctcttattaatctgtgaggattaatatacaaaaagtatcctttgagatgaagtcgtgttctcaaaataaggttatattattttctttttctgcttgattttcatcttgtgttttgctttgtttttgtaaggaaccatctcttggtttggtcacatcagttcacaacagccatttgttttcaaggtcaaggctccaggcaggttgttactggtgtttgcagcctgtcagtacttgcagtactggaataggttctaggctagtgtctgcgcgtcactgtggttttagcatgggaggacttatttgagaaatactaccttacttttctatgatttctttttacagagttatagtgtgtttactcctaagatgacagttctctttgtctatattcagcatctaagacaaatatttaaacattttaaagaaccactgtgttaagtttaggattatttacttaccaaattagaagtttgacttttatgtgttatacacaatcttaaaatttcacgaattcacctttttaatagtatccatgtacataataaaatcaaagtttaattaaaaaaaaaaaaaaaaaa

SEQ ID NO: 106 - DNA, 555 bp, Unknown
  TRAF-interacting protein with a forkhead-associated domain
  exon (1)..(555)
atgaccagttttgaagatgctgacacagaagagacagtaacttgtctccagatgacggtttaccatcctggccagttgcagtgtggaatatttcagtcaataagttttaacagagagaaactcccttccagcgaagtggtgaaatttggccgaaattccaacatctgtcattatacttttcaggacaaacaggtttcccgagttcagttttctctgcagctgtttaaaaaattcaacagctcagttctctcctttgaaataaaaaatatgagtaaaaagaccaatctgatcgtggacagcagagagctgggctacctaaataaaatggacctgccatacaggtgcatggtcagattcggagagtatcagtttctgatggagaaggaagatggcgagtcattggaattttttgagactcaatttattttatctccaagatcactcttgcaagaaaacaactggccaccacacaggcccataccggagtatggcacttattcgctctgctcctcccaaagcagttctccgacagaaatggatgaaaatgagtcatga

SEQ ID NO: 107 - DNA, 714 bp, Unknown
  No homology
ggactgactattgggctccctgggcaaggggaaggggaagggagagccttttagattcattcttgatttccatacttctacgatgttgctcagaggactgctccgccttctgggcttgttgtcaggtggaatgaatgcacctctggagaccattgggctctgctttgtcatccccgtgcctttaatggccccatgagtctatcactacatttttaacaccagtcctgaaatctggaccatgatttcttttgaacctctcaaacggtaaaattcctcagaaaccaaagctttattaaccaacttccacactcatttctttggatacttattccttccccggctggttctacctatgaccagaagcctgttttcctacagaagacccatgctagacctcatttgaactaagcacacattttgtttgtagctacaggcctggatatcttactgttggtaaatttctttacctgacatcactgtatattattgttgttttaaaacctgtgaaagaaggattcagaatgaccactaattttcagatcaaggaaatatgacaagtgaagcgcagcagacattgctaacacacggaacctacctgtttgaaactaaactttcaagcaatctcaaactctctcccataaggacaaagcagctgtgtgctcacacataaatagtttgcatggccctacgccctttctccctaggggattggaa

SEQ ID NO: 108 - DNA, 729 bp, Unknown
  No homology
cagatgtctagaagtcttccaaagatgaaaacactggaagcattatcctagtcatcagtctggagcctgactcctgttcctttggagtcattataaattctataaatgaattatcccccttcagtcttcagaaacataccttctcatgtgcatttcagttttgttgaaaggatggagtccacaaagatatcattcttgagtcatggatttctttgcttacaaaacggtctgtgattttggaactggaaataaacgaaatggtaataatttagactgtggcacactgatgcactgaataaaggaacagatagaggagctggtctgttgacagctgtagttcagtatgcaattacagagaaagatacacctcatctgaatgtacatattcaaggtgaaagacttcttagcgttccagtttgctggccaattgcacctgctgtgttgttttccatccatcccacagtcaactggttgaaaggagttatttctccccatgacttcaaacaaaatttaacccagaattgtaaatagtggctgcaggaattcttttctaaaatgctttccccttcttcttactgccttttatagcaaagataattgtctatttacacactttttgttgtggttttgtattgtaacaccatttttctttgagactattgtatttaaaggaagtttcatatagtgtcaagcaagtaattaaattatgtctgaaagctggccatattc

SEQ ID NO: 109 - DNA, 2407 bp, Unknown
  Heterogeneous nuclear ribonucleoprotein F
ggggcggttcccgtagccttagctctcggccctgggccctttttcctcctcggctgcgccgcgtgtcctcggagcgcggtccctgtattggtctcctgctcctagaggttgagaacaaaaacatgcacctggagtttccccggagccctctgcgtggttgagcttcggtggaatttcggggctcttggctgccagccgcgcttgcctggtagcaacagaaaccagtcctgctcgcctccgtggacatttcattaccatccagaagtgtctcccactgaaggcatccgtggttgtttttaagccacaaaaaagccacacccaagatcacctgacacccaccctgtcaagtgtccatgatgctgggccctgagggaggtgaaggctttgtggtcaagctccgtggcctgccctggtcctgctctgttgaggacgtgcagaacttcctctctgactgcacgattcatgatggggccgcaggtgtccatttcatctacactagagagggcaggcagagtggtgaggcttttgttgaacttggatcagaagatgatgtaaaaatggccctgaaaaaagacagggaaagcatgggacaccggtacattgaggtgttcaggtcccacagaaccgagatggattgggtgttgaagcacagtggtcccaacagtgccgacagcgccaacgatggcttcgtgcggcttcgaggactcccatttggatgcacaaaggaagaaattgttcagttcttctcagggttggaaattgtgccaaacgggatcacattgcctgtggaccccgaaggcaagattacaggggaagcgttcgtgcagtttgcctcgcaggagttagctgagaaggctctagggaaacacaaggagaggatagggcacaggtacattgaggtgtttaagagcagccaggaggaagttaggtcatactcagatccccctctgaagttcatgtccgtgcagcggccagggccctatgaccggcccgggactgccaggaggtacattggcatcgtgaagcaggcaggcctggaaaggatgaggcctggtgcctacagcacaggctacgggggctacgaggagtacagtggcctcagtgatggctacggcttcaccaccgacctgttcgggagagacctcagctactgtctctccggaatgtatgaccacagatacggcgacagtgagttcacagtgcagagcaccacaggccactgtgtccacatgaggggcctgccgtacaaagcgaccgagaacgacatttacaacttcttctctcctctcaaccctgtgagagtccatattgagattggcccagatggaagagtgacgggtgaagcagatgttgagtttgctactcatgaagaagctgtggcagctatgtccaaagacagggccaatatgcagcacagatatatagaactcttcttgaattcaacaacaggggccagcaatggggcgtatagcagccaggtgatgcaaggcatgggggtgtctgctgcccaggccacttacagtggcctggagagccagtcagtgagtggctgttacggggccggctacagtgggcagaacagcatgggtggctatgactagttttgttaggaacatttgagttacttcaatcattttcacaggcagccaacaagcaattaagagcagttataatagaggaagctgggggacccattttgcaccatgagtttgtgaaaaatctggattaaaaaattacctcttcagtgttttctcatgcaaaattttcttctagcatgtgataatgagtaaactaaaactattttcagcttttctcaattaacattttggtagtatacttcagagtgatgttatctaagtttaagtagtttaagtatgttaaatgtggatcttttacaccacatcacagtgaacacactggggagacgtccttttttggaaaactcaaaggtgctagctccctgattcaaagaaatatttctcatgtttgttcattctagtttatattttcatttaaaatcctttaggttaagtttaagctttttaaaagttagttttgagaattgagacacaatactaatactgtaggaattggtgaggccttgacttaaaactttctttgtactgtgatttccttttgggtgtattttgctaagtgaaacttgttaaattttttgttaactaaatttttttcttaaaataaagactttttcacaatgactggcacagattactcagcaaaagatagcaaaacgggtggttgaagataattcattttaatcgtaatgtattttagtgtgaatttaaaaatttcatacatcaaatctatgatctcccttatattcttatgatgaggctaaataaaagtctaataaaaacgaaaaaaaaaaaaaaaaaaaaaaaaaaaa

SEQ ID NO: 110 - DNA, 1248 bp, Unknown
  Heterogeneous nuclear ribonucleoprotein F
  exon (1)..(1248)
atgatgctgggccctgagggaggtgaaggctttgtggtcaagctccgtggcctgccctggtcctgctctgttgaggacgtgcagaacttcctctctgactgcacgattcatgatggggccgcaggtgtccatttcatctacactagagagggcaggcagagtggtgaggcttttgttgaacttggatcagaagatgatgtaaaaatggccctgaaaaaagacagggaaagcatgggacaccggtacattgaggtgttcaagtcccacagaaccgagatggattgggtgttgaagcacagtggtcccaacagtgccgacagcgccaacgatggcttcgtgcggcttcgaggactcccatttggatgcacaaaggaagaaattgttcagttcttctcagggttggaaattgtgccaaacgggatcacattgcctgtggaccccgaaggcaagattacaggggaagcgttcgtgcagtttgcctcgcaggagttagctgagaaggctctagggaaacacaaggagaggatagggcacaggtacattgaggtgtttaagagcagccaggaggaagttaggtcatactcagatccccctctgaagttcatgtccgtgcagcggccagggccctatgaccggcccgggactgccaggaggtacattggcatcgtgaagcaggcaggcctggaaaggatgaggcctggtgcctacagcacaggctacgggggctacgaggagtacagtggcctcagtgatggctacggcttcaccaccgacctgttcgggagagacctcagctactgtctctccgggatgtatgaccacagatacggcgacagtgagttcacagtgcagagcaccacaggccactgtgtccacatgaggggcctgccgtacaaagcgaccgagaacgacatttacaacttcttctctcctctcaaccctgtgagagtccatattgagattggcccagatggaagagtgacgggtgaagcagatgttgagtttgctactcatgaagaagctgtggcagctatgtccaaagacagggccaatatgcagcacagatatatagaactcttcttgaattcaacaacaggggccagcaatggggcgtatagcagccaggtgatgcaaggcatgggggtgtctgctgcccaggccacttacagtggcctggagagccagtcagtgagtggctgttacggggccggctacagtgggcagaacagcatgggtggctatgactag

SEQ ID NO: 111 - DNA, 1252 bp, Unknown
  Dendritic cell protein variant clone
gtcttgcgagtggagtgtccgctgtgcccgggcctgcaccatgagcgtcccggccttcatcgacatcagtgaagaagatcaggctgctgagcttcgtgcttatctgaaatctaaaggagctgagatttcagaagagaactcggaaggtggacttcatgttgatttagctcaaattattgaagcctgtgatgtgtgtctgaaggaggatgataaagatgttgaaagtgtgatgaacagtgtggtatccctactcttgatcctggaaccagacaagcaagaagctttgattgaaagcctatgtgaaaagctggtcaaatttcgcgaaggtgaacgcccgtctctgagactgcagttgttaagcaaccttttccacgggatggataagaatactcctgtaagatacacagtgtattgcagccttattaaagtggcagcatcttgtggggccatccagtacatcccaactgagctggatcaagttagaaaatggatttctgactggaatctcaccactgaaaaaaagcacacccttttaagactactttatgaggcacttgtggattgtaagaagagtgatgctgcttcaaaagtcatggtggaattgctcggaagttacacagaggacaatgcttcccaggctcgagttgatgcccacaggtgtattgtacgagcattgaaagatccaaatgcatttctttttgaccaccttcttactttaaaaccagtcaagtttttggaaggcgagcttattcatgatcttttaaccatttttgtgagtgctaaattggcatcatatgtcaagttttatcagaataataaagacttcattgattcacttggcctgttacatgaacagaatatggcaaaaatgagactacttacttttatgggaatggcagtagaaaataaggaaatttcttttgacacagtgcagcaagaacttcagattggagctgatgatgttgaagcatttgttattgacgccgtaagaactaaaatggtctactgcaaaattgatcagacccagagaaaagtagttgtcagtcatagcacacatcggacatttggaaaacagcagtggcaacaactgtatgacacacttaatgcctggaaacaaaatctgaacaaagtgaaaaacagccttttgagtctttctgatacctgagtttttatgcttataatttttgttctttgaaaaaaaagccctaaatcatagtaaaacattataaactaaaaaaaaaaaaaaaaaaaa

SEQ ID NO: 112 - DNA, 1125 bp, Unknown
  Dendritic cell protein variant
  exon (1)..(1125)
atgagcgtcccggccttcatcgacatcagtgaagaagatcaggctgctgagcttcgtgcttatctgaaatctaaaggagctgagatttcagaagagaactcggaaggtggacttcatgttgatttagctcaaattattgaagcctgtgatgtgtgtctgaaggaggatgataaagatgttgaaagtgtgatgaacagtgtggtatccctactcttgatcctggaaccagacaagcaagaagctttgattgaaagcctatgtgaaaagctggtcaaatttcgcgaaggtgaacgcccgtctctgagactgcagttgttaagcaaccttttccacgggatggataagaatactcctgtaagatacacagtgtattgcagccttattaaagtggcagcatcttgtggggccatccagtacatcccaactgagctggatcaagttagaaaatggatttctgactggaatctcaccactgaaaaaaagcacacccttttaagactactttatgaggcacttgtggattgtaagaagagtgatgctgcttcaaaagtcatggtggaattgctcggaagttacacagaggacaatgcttcccaggctcgagttgatgcccacaggtgtattgtacgagcattgaaagatccaaatgcatttctttttgaccaccttcttactttaaaaccagtcaagtttttggaaggcgagcttattcatgatcttttaaccatttttgtgagtgctaaattggcatcatatgtcaagttttatcagaataataaagacttcattgattcacttggcctgttacatgaacagaatatggcaaaaatgagactacttacttttatgggaatggcagtagaaaataaggaaatttcttttgacacagtgcagcaagaacttcagattggagctgatgatgttgaagcatttgttattgacgccgtaagaactaaaatggtctactgcaaaattgatcagacccagagaaaagtagttgtcagtcatagcacacatcggacatttggaaaacagcagtggcaacaactgtatgacacacttaatgcctggaaacaaaatctgaacaaagtgaaaaacagccttttgagtctttctgatacctga

SEQ ID NO: 113 - DNA, 1315 bp, Unknown
  CGI-54 protein
ctggcgtcccctttccggccggtccccatggaggcgctggggaagctgaagcagttcgatgcctaccccaagactttggaggacttccgggtcaagacctgcgggggcgccaccgtgaccattgtcagtggccttctcatgctgctactgttcctgtccgagctgcagtattacctcaccacggaggtgcatcctgagctctacgtggacaagtcgcggggagataaactgaagatcaacatcgatgtactttttccgcacatgccttgtgcctatctgagtattgatgccatggatgtggccggagaacagcagctggatgtggaacacaacctgttcaagcaacgactagataaagatggcatccccgtgagctcagaggctgagcggcatgagcttgggaaagtcgaggtgacggtgtttgaccctgactccctggaccctgatcgctgtgagagctgctatggtgctgaggcagaagatatcaagtgctgtaacacctgtgaagatgtgcgggaggcatatcgccgtagaggctgggccttcaagaacccagatactattgagcagtgccggcgagagggcttcagccagaagatgcaggagcagaagaatgaaggctgccaggtgtatggcttcttggaagtcaataaggtggccggaaacttccactttgcccctgggaagagcttccagcagtcccatgtgcacgtccatgacttgcagagctttggccttgacaacatcaacatgacccactacatccagcacctgtcatttggggaggactatccaggcattgtgaaccccctggaccacaccaatgtcactgcgccccaagcctccatgatgttccagtactttgtgaaggtggtgcccactgtgtacatgaaggtggacggagaggtactgaggacaaatcagttctctgtgaccagacatgagaaggttgccaatgggctgttgggcgaccaaggccttcccggagtcttcgtcctctatgagctctcgcccatgatggtgaagctgacggagaagcacaggtccttcacccacttcctgacaggtgtgtgcgccatcattgggggcatgttcacagtggctggactcatcgattcgctcatctaccactcagcacgagccatccagaagaaaattgatctagggaagacaacgtagtcaccctcggtgcttcctctgtctcctctttctccctggcctgtggttgtcccccagcctctgccaccctccacctcctcggtcagccccagccccaggttgataaatctattgattgattgtgatagtaaaaaaa

SEQ ID NO: 114 - DNA, 1152 bp, Unknown
  CGI-54 protein
  exon (1)..(1152)
atggaggcgctggggaagctgaagcagttcgatgcctaccccaagactttggaggacttccgggtcaagacctgcgggggcgccaccgtgaccattgtcagtggccttctcatgctgctactgttcctgtccgagctgcagtattacctcaccacggaggtgcatcctgagctctacgtggacaagtcgcggggagataaactgaagatcaacatcgatgtactttttccgcacatgccttgtgcctatctgagtattgatgccatggatgtggccggagaacagcagctggatgtggaacacaacctgttcaagcaacgactagataaagatggcatccccgtgagctcagaggctgagcggcatgagcttgggaaagtcgaggtgacggtgtttgaccctgactccctggaccctgatcgctgtgagagctgctatggtgctgaggcagaagatatcaagtgctgtaacacctgtgaagatgtgcgggaggcatatcgccgtagaggctgggccttcaagaacccagatactattgagcagtgccggcgagagggcttcagccagaagatgcaggagcagaagaatgaaggctgccaggtgtatggcttcttggaagtcaataaggtggccggaaacttccactttgcccctgggaagagcttccagcagtcccatgtgcacgtccatgacttgcagagctttggccttgacaacatcaacatgacccactacatccagcacctgtcatttggggaggactatccaggcattgtgaaccccctggaccacaccaatgtcactgcgccccaagcctccatgatgttccagtactttgtgaaggtggtgcccactgtgtacatgaaggtggacggagaggtactgaggacaaatcagttctctgtgaccagacatgagaaggttgccaatgggctgttgggcgaccaaggccttcccggagtcttcgtcctctatgagctctcgcccatgatggtgaagctgacggagaagcacaggtccttcacccacttcctgacaggtgtgtgcgccatcattgggggcatgttcacagtggctggactcatcgattcgctcatctaccactcagcacgagccatccagaagaaaattgatctagggaagacaacgtag

SEQ ID NO: 115 - DNA, 1988 bp, Unknown
  IBR domain containing 3
catgctgcgccgctacctagcctcggaccccgactgccgctggtgcccggccccggactgcggttatgctgttattgcctatggctgtgccagctgcccgaagctaacttgtgagagggaaggttgccagactgagttctgctaccactgcaagcagatatggcatccaaatcagacatgcgatatggcccgtcaacagagggcccagactttacgagttcggaccaaacacacttcaggtctcagttatgggcaagaatctggaccagcagatgacgtcaagccatgcccacgatgcagtgcatacattatcaagatgaatgatggaagctgtaatcacatgacctgtgcagtgtgtggctgtgaattctgttggctttgtatgaaagagatctcagacttgcattacctcagcccctctggctgtacattctggggcaagaagccatggagccgtaagaagaaaattctttggcagctgggcacgttgattggtgctccagtggggatttctctcattgctggcattgccattcctgccatggtcattggcattcctgtttatgttggaaggaagattcacagcaggtatgagggaaggaaaacctccaaacacaagaggaatttggctatcactggaggagtgactttgtcggtcattgcatccccagttattgctgcagttagtgttggtattggtgtccccattatgctggcatatgtttatggggttgtgcccatttctctttgtcgtggaggcggctgtggagttagcacagccaacggaaaaggagtgaaaattgaatttgatgaagatgatggtccaatcacagtggcagatgcctggagagccctcaagaatcccagcattggggaaagcagcattgaaggcctgactagtgtattgagcactagtggaagccctacagatggacttagtgttatgcaaggtccttacagcgaaacggccagctttgcagccctctcagggggcacgctgagtggcggcattctctccagtggcaagggaaaatatagcaggttagaagttcaagccgatgtccaaaaggaaattttccccaaagacacagccagtcttggtgcaattagtgacaacgcaagcactcgtgctatggccggttccataatcagttcctacaacccacaggacagagaatgcaacaatatggaaatccaagtggacattgaagccaaaccaagccactatcagctggtgagtggaagcagcacggaggactcgctccatgttcatgctcagatggcagagaatgaagaagaaggtagtggtggcggaggcagtgaagaggatcccccctgcagacaccaaagctgtgaacagaaagactgcctggccagcaaaccttgggacatcagcctggcccagcctgaaagcatccgcagtgacctagagagttctgatgcacagtcagacgatgtgccagacatcacctcagatgagtgtggctccccccgctcccatactgcagcctgcccctcgacccccagagcccaaggtgcaccgagcccaagtgcccatatgaacctctctgccctagccgagggacaaactgtcttgaagccagaaggtggagaagccagagtatgaagtggaatgaatgctcctgttctgagaagcacacttgtaactgcatcttttggaattttttttttttttttttccaaggggtagagatttatgtattttatttcacagattctctggtcacaggtttttgcccagggaaattctgagaaattcacaatttcttaccagataaaacatgaaaagtttgccgttagttcccctcccctcccctccctctttttagttttaatttattggttaaactgatggcagcaatccatgaggtgtgtcaaagagtgtacatatgtatgtgtgtatattgaatgctaaacatattactgaaagacacattttaataaagatttctgtcataattcaactt

SEQ ID NO: 116 - DNA, 1626 bp, Unknown
  IBR domain containing 3 (IBRDC3)
  exon (1)..(1626)
atgctgcgccgctacctagcctcggaccccgactgccgctggtgcccggccccggactgcggttatgctgttattgcctatggctgtgccagctgcccgaagctaacttgtgagagggaaggttgccagactgagttctgctaccactgcaagcagatatggcatccaaatcagacatgcgatatggcccgtcaacagagggcccagactttacgagttcggaccaaacacacttcaggtctcagttatgggcaagaatctggaccagcagatgacgtcaagccatgcccacgatgcagtgcatacattatcaagatgaatgatggaagctgtaatcacatgacctgtgcagtgtgtggctgtgaattctgttggctttgtatgaaagagatctcagacttgcattacctcagcccctctggctgtacattctggggcaagaagccatggagccgtaagaagaaaattctttggcagctgggcacgttgattggtgctccagtggggatttctctcattgctggcattgccattcctgccatggtcattggcattcctgtttatgttggaaggaagattcacagcaggtatgagggaaggaaaacctccaaacacaagaggaatttggctatcactggaggagtgactttgtcggtcattgcatccccagttattgctgcagttagtgttggtattggtgtccccattatgctggcatatgtttatggggttgtgcccatttctctttgtcgtggaggcggctgtggagttagcacagccaacggaaaaggagtgaaaattgaatttgatgaagatgatggtccaatcacagtggcagatgcctggagagccctcaagaatcccagcattggggaaagcagcattgaaggcctgactagtgtattgagcactagtggaagccctacagatggacttagtgttatgcaaggtccttacagcgaaacggccagctttgcagccctctcagggggcacgctgagtggcggcattctctccagtggcaagggaaaatatagcaggttagaagttcaagccgatgtccaaaaggaaattttccccaaagacacagccagtcttggtgcaattagtgacaacgcaagcactcgtgctatggccggttccataatcagttcctacaacccacaggacagagaatgcaacaatatggaaatccaagtggacattgaagccaaaccaagccactatcagctggtgagtggaagcagcacggaggactcgctccatgttcatgctcagatggcagagaatgaagaagaaggtagtggtggcggaggcagtgaagaggatcccccctgcagacaccaaagctgtgaacagaaagactgcctggccagcaaaccttgggacatcagcctggcccagcctgaaagcatccgcagtgacctagagagttctgatgcacagtcagacgatgtgccagacatcacctcagatgagtgtggctccccccgctcccatactgcagcctgcccctcgacccccagagcccaaggtgcaccgagcccaagtgcccatatgaacctctctgccctagccgagggacaaactgtcttgaagccagaaggtggagaagccagagtatga

SEQ ID NO: 117 - DNA, 894 bp, Unknown
  No homology
  misc_feature (610)..(610): n is a, c, g, or t
ggacctttggcacaaacactgaaaagagttatgttgataatcagaagtgattgatggagcagaattccagcgtttcatggagagttgaagtacatgatgacaaaacccttgggaaaaccttctaatttcttgggacatttcaaggaagcaacatccccctttcttccaggaacttttttgtgacttgactaggactcgcactgctcccaaagttatcgccatcccaccttgctctccgtctcccataaaatcttgagggccacggagagaaggaggcgaattttaaatgtagatctcctcccttccacagccagtctcaaacacacctactcaaggtgtggtccatggaccagaagcatgagcatcattttgttagaaaagcagcatcaaaggtaccaccgcagatcttcggaaccagaacctgcattttaacaagatccccagggaatttgtgttgtacacaggagtgaatgttctggcatattctagagtattcttttgttttccatgctgacagaagagcttgtctttaaaactaggcaggaaaacatatcctcgactttgggactttgcatctgccattctctcttcctaggacaactttcctcanaatcggactaatttctaccctctcttcgagtctcagcatagtcatcaatttcaccaggaagcattctctgaatctcttgaagtaggattaggtgtcacctctgtgtgtcctctaaggcttcatgatttctagccttgtgtgatcatttcttctcttcttgagtgtctccaactggactgtgagctccataattacagggaatggcattcagttgattctccataaataagttgaatgaatgaatgaatgattactttccattttgaagatgaagaatttgaggc

SEQ ID NO: 118 - DNA, 569 bp, Unknown
  No homology
accattcctgctctcactatggcttggccttgagacttgctttggctaatggaatgtcagcaagtgtgactcagacagagtgtgcattccttcttgcccgttacacgataagtctcgcttgttcttgcacccctgcctccgccatgagaatgtgcccaggctgaactgctggagggatgtgaaaaatgtatggaagacagttaagtcattccattataccagctgaggttgtccttaatcagccatcggaccaacttgtagctgactacagtcacatccatgagcccagtcaagatcagcagacctgcccgggcaacccagactcaggagccacaatcaagtaccattattttagggcacagagtttcaggagtggtttgttaacgaagtattcttggtggaagttgctaactgattcagcaaccaatggattgtcaatgttttgcatttgactgcaacaatttggaacatacaaagagggtgattcgcatcttcatttcctcttagctgtcaggatctgtaaatctaaaacgctttgaataaagttctttctgacagaaaaaaaaaaa

SEQ ID NO: 119 - DNA, 1099 bp, Unknown
  Activated RNA polymerase II transcription cofactor 4 variant protein
gactgctagagccgagcgaagcgatgcctaaatcaaaggaacttgtttcttcaagctcttctggcagtgattctgacagtgaggttgacaaaaagttaaagaggaaaaagcaagttgctccagaaaaacctgtaaagaaacaaaagacaggtgagacttcgagagccctgtcatcttctaaacagagcagcagcagcagagatgataacatgtttcagattgggaaaatgaggtacgttagtgttcgcgattttaaaggcaaagtgctaattgatattagagaatattggatggatcctgaaggtgaaatgaaaccaggaagaaaaggtatttctttaaatccagaacaatggagccagctgaaggaacagatttctgacattgatgatgcagtaagaaaactgtaaaattcgagccatataaataaaacctgtactgttctagttgttttaatctgtctttttacattggcttttgttttctaaatgttctccaagctattgtatgtttggattgcagaagaatttgtaagatgaatacttttttttaatgtgcattattaaaaatattgagtgaagctaattgtcaactttattaaggattactttgtctgcccaccacctagtgtaaaataaaatcaagtaatacaatcttaactgttgtggccttttttgatcataagagttggtactgtttaaggccaaaagtaacagtttttatagatcttttagtttcaactcagcttttacaataaaaaggatttgtattgcattgagtttataaacttttggtttgtgaacttcatatttgatcttttctcttccaatcaaatgtctaggcttgtttgacttccacccccaatggtttttcactctttttatttacttcattttcctttaataacttaatctcttcatgttcagtttttacttcactctttattcttttctttgattatggtatgcttatttggaaagtcagtgaaactgtcaaaatgttatctcaataagatacttatatgagaactacaatcaccgaatctactgtattcaatattagcagatctaatttgataaacaacatggcttgtgtgaaaact

SEQ ID NO: 120 - DNA, 405 bp, Unknown
  Activated RNA polymerase II transcription cofactor 4 variant protein (incomplete)
  exon (1)..(405)
ctgctagagccgagcgaagcgatgcctaaatcaaaggaacttgtttcttcaagctcttctggcagtgattctgacagtgaggttgacaaaaagttaaagaggaaaaagcaagttgctccagaaaaacctgtaaagaaacaaaagacaggtgagacttcgagagccctgtcatcttctaaacagagcagcagcagcagagatgataacatgtttcagattgggaaaatgaggtacgttagtgttcgcgattttaaaggcaaagtgctaattgatattagagaatattggatggatcctgaaggtgaaatgaaaccaggaagaaaaggtatttctttaaatccagaacaatggagccagctgaaggaacagatttctgacattgatgatgcagtaagaaaactgtaa

SEQ ID NO: 121 - DNA, 4854 bp, Unknown
  Retinoblastoma like 2
  misc_feature (4407)..(4407): n is a, c, g, or t
agcgggcaggcgcggtgcgggcggcggacgggcgggcgcttcgccgtttgaatggctgcgggcccgggccctcacctcacctgaggtccggccgcccaggggtgcgctatgccgtcgggaggtgaccagtcgccaccgcccccgcctccccctccggcggcggcagcctcggatgaggaggaggaggacgacggcgaggcggaagacgccgcgccgcctgccgagtcgcccacccctcagatccagcagcggttcgacgagctgtgcagccgcctcaacatggacgaggcggcgcgggccgaggcctgggacagctaccgcagcatgagcgaaagctacacgctggagggaaatgatcttcattggttagcatgtgccttatatgtggcttgcagaaaatctgttccaactgtaagcaaagggacagtggaaggaaactatgtatctttaactagaatcctgaaatgttcagagcagagcttaatcgaattttttaataagatgaagaagtgggaagacatggcaaatctacccccacatttcagagaacgtactgagagattagaaagaaacttcactgtttctgctgtaatttttaagaaatatgaacccatttttcaggacatctttaaataccctcaagaggagcaacctcgtcagcagcgaggaaggaaacagcggcgacagccctgtactgtgtctgaaattttccatttttgttgggtgctttttatatatgcaaaaggtaatttccccatgattagtgatgatttggtcaattcttatcacctgctgctgtgtgctttggacttagtttatggaaatgcacttcagtgttctaatcgtaaagaacttgtgaaccctaattttaaaggcttatctgaagattttcatgctaaagattctaaaccttcctctgaccccccttgtatcattgagaaactgtgttccttacatgatggcctagttttggaagcaaaggggataaaggaacatttctggaaaccctatattaggaaactttatgaaaaaaagctccttaagggaaaagaagaaaatctcactgggtttctagaacctgggaactttggagagagttttaaagccatcaataaggcctatgaggagtatgttttatctgttgggaatttagatgagcggatatttcttggagaggatgctgaggaggaaattgggactctctcaaggtgtctgaacgctggttcaggaacagagactgctgaaagggtgcagatgaaaaacatcttacagcagcattttgacaagtccaaagcacttagaatctccacaccactaactggtgttaggtacattaaggagaatagcccttgtgtgactccagtttctacagctacgcatagcttgagtcgtcttcacaccatgctgacaggcctcaggaatgcaccaagtgagaaactggaacagattctcaggacatgttccagagatccaacccaggctattgctaacagactgaaagaaatgtttgaaatatattctcagcatttccagccagacgaggatttcagtaattgtgctaaagaaattgccagcaaacattttcgttttgcggagatgctttactataaagtattagaatctgttattgagcaggaacaaaaaagactaggagacatggatttatctggtattctggaacaagatgcgttccacagatctctcttggcctgctgccttgaggtcgtcactttttcttataagcctcctgggaattttccatttattactgaaatatttgatgtgcctctttatcatttttataaggtgatagaagtattcattagagcagaagatggcctttgtagagaggtggtaaaacaccttaatcagattgaagaacagatcttagatcatttggcatggaaaccagagtctccactctgggaaaaaattagagacaatgaaaacagagttcctacatgtgaagaggtcatgccacctcagaacctggaaagggcagatgaaatttgcattgctggctcccctttgactcccagaagggtgactgaagttcgtgctgatactggaggacttggaaggagcataacatctccaaccacattatacgataggtacagctccccaccagccagcactaccagaaggcggctatttgttgagaatgatagcccctctgatggagggacgcctgggcgcatgcccccacagcccctagtcaatgctgtccctgtgcagaatgtatctggggagactgtttctgtcacaccagttcctggacagactttggtcaccatggcaaccgccactgtcacagccaacaatgggcaaacggtaaccattcctgtgcaaggtattgccaatgaaaatggagggataacattcttccctgtccaagtcaatgttggggggcaggcacaagctgtgacaggctccatccagcccctcagtgctcaggccctggctggaagtctgagctctcaacaggtgacaggaacaactttgcaagtccctggtcaagtggccattcaacagatttccccaggtggccaacagcagaagcaaggccagtctgtaaccagcagtagtaatagacccaggaagaccagctctttatcgcttttctttagaaaggtataccatttagcagctgtccgccttcgggatctctgtgccaaactagatatttcagatgaattgaggaaaaaaatctggacctgctttgaattctccataattcagtgtcctgaacttatgatggacagacatctggaccagttattaatgtgtgccatttatgtgatggcaaaggtcacaaaagaagataagtccttccagaacattatgcgttgttataggactcagccgcaggcccggagccaggtgtatagaagtgttttgataaaaggaaaaagaaaaagaagaaattctggcagcagtgatagcagaagccatcagaattctccaacagaactaaacaaagatagaaccagtagagactccagtccagttatgaggtcaagcagcaccttgccagttccacagcccagcagtgctcctcccacacctactcgcctcacaggtgccaacagtgacatggaagaagaggagaggggagacctcattcagttctacaacaacatctacatcaaacagattaagacatttgccatgaagtactcacaggcaaatatggatgctcctccgctctctccctatccatttgtaagaacaggctctcctcgccgaatacagttgtctcaaaatcatcctgtctacatttccccacataaaaatgaaacaatgctttctcctcgtgaaaagattttctactacttcagcaacagtccttcaaagagactaagagaaattaacagtatgatccggacaggagaaactccaaccaaaaagcgagggattcttttggaagacggaagtgaatcacctgcaaaaagaatttgcccagaaaatcattctgccttactgcgccgtctacaagatgtagctaatgaccgaggttcccactgaggttagtccatggtattgaaactgtcttctcacaaactctgtttagcagcatcatttaatgcatgctcgattatggggctctttcccttaatccttccagtatccataggatattctgactcatcccaactgccttttttcctaccattcagtgcttgccctcaaggctgcttagaatccaaacttggatttttgactctggcaaagcttttagaaatactgcaagaaaatgatgtgtacccaaacgtgagcataggaggcttctgttgacgtactccaacagaagaactgttttcaagttcattcctacccgttttgtggtcacctttggccctcacaaaaagtaaaacaaaaactaggtattttgtcctaaaacacctggtaggagtgtgtgattttttgcattcctgacaaaggagagcacacccaggtttggaggtcctaggtcattagccctcgtctcccgttccctttgtgcacatcttccctctccccattcggtgtggtgcagtgtgaaaagtccttgattgttcgggtgtgcaatgtctgagtgaacctgtataagtggaggcactttagggctgtaaaatgcatgattttgtaacccagattttgctgtatatttgcgatggcactttctacaatgtgaactttattaagtataaaacttctaggctaaacattcaatatcttctttgatgcttttgtacttttttaaaattgttaaagccccagtagccaccttttgggcatatttgaaattctccagtttttgattattaagagggatcagctggctaagtaaagattttaaatcaagttgaattaaggggattaataggaaaattatgacctcttcctttaggaggcagttatccnaaagacatgtctattaaggtgatatattttaaaatatctttgagtgtgttcctggcagtttaagaaaatagttggagaatttaggtttttattagtacacagtaccatttatacaaattagaaaatgttatttaacagctattgaattatctatatacacctttattaatcgctattgttccagcagttttaacgttgaacgaataatcttattagggagaaaattcaattgtaaattgaatcagtataaacaaagttactaggtaacttcacattgctctgaaagaaatatggaacttacactgttcaattagaatagtgttctgcaaaaatatttataaaacctctcagatactgctactgtaattttatatgaaaataagtgtatttttcaataaagcatttataaattaaaaaaaaaaaaaaaaaaacaaaaaaaaaaaaaaa

SEQ ID NO: 122 - DNA, 3420 bp, Unknown
  Retinoblastoma like 2
  exon (1)..(3420)
atgccgtcgggaggtgaccagtcgccaccgcccccgcctccccctccggcggcggcagcctcggatgaggaggaggaggacgacggcgaggcggaagacgccgcgccgcctgccgagtcgcccacccctcagatccagcagcggttcgacgagctgtgcagccgcctcaacatggacgaggcggcgcgggccgaggcctgggacagctaccgcagcatgagcgaaagctacacgctggagggaaatgatcttcattggttagcatgtgccttatatgtggcttgcagaaaatctgttccaactgtaagcaaagggacagtggaaggaaactatgtatctttaactagaatcctgaaatgttcagagcagagcttaatcgaattttttaataagatgaagaagtgggaagacatggcaaatctacccccacatttcagagaacgtactgagagattagaaagaaacttcactgtttctgctgtaatttttaagaaatatgaacccatttttcaggacatctttaaataccctcaagaggagcaacctcgtcagcagcgaggaaggaaacagcggcgacagccctgtactgtgtctgaaattttccatttttgttgggtgctttttatatatgcaaaaggtaatttccccatgattagtgatgatttggtcaattcttatcacctgctgctgtgtgctttggacttagtttatggaaatgcacttcagtgttctaatcgtaaagaacttgtgaaccctaattttaaaggcttatctgaagattttcatgctaaagattctaaaccttcctctgaccccccttgtatcattgagaaactgtgttccttacatgatggcctagttttggaagcaaaggggataaaggaacatttctggaaaccctatattaggaaactttatgaaaaaaagctccttaagggaaaagaagaaaatctcactgggtttctagaacctgggaactttggagagagttttaaagccatcaataaggcctatgaggagtatgttttatctgttgggaatttagatgagcggatatttcttggagaggatgctgaggaggaaattgggactctctcaaggtgtctgaacgctggttcaggaacagagactgctgaaagggtgcagatgaaaaacatcttacagcagcattttgacaagtccaaagcacttagaatctccacaccactaactggtgttaggtacattaaggagaatagcccttgtgtgactccagtttctacagctacgcatagcttgagtcgtcttcacaccatgctgacaggcctcaggaatgcaccaagtgagaaactggaacagattctcaggacatgttccagagatccaacccaggctattgctaacagactgaaagaaatgtttgaaatatattctcagcatttccagccagacgaggatttcagtaattgtgctaaagaaattgccagcaaacattttcgttttgcggagatgctttactataaagtattagaatctgttattgagcaggaacaaaaaagactaggagacatggatttatctggtattctggaacaagatgcgttccacagatctctcttggcctgctgccttgaggtcgtcactttttcttataagcctcctgggaattttccatttattactgaaatatttgatgtgcctctttatcatttttataaggtgatagaagtattcattagagcagaagatggcctttgtagagaggtggtaaaacaccttaatcagattgaagaacagatcttagatcatttggcatggaaaccagagtctccactctgggaaaaaattagagacaatgaaaacagagttcctacatgtgaagaggtcatgccacctcagaacctggaaagggcagatgaaatttgcattgctggctcccctttgactcccagaagggtgactgaagttcgtgctgatactggaggacttggaaggagcataacatctccaaccacattatacgataggtacagctccccaccagccagcactaccagaaggcggctatttgttgagaatgatagcccctctgatggagggacgcctgggcgcatgcccccacagcccctagtcaatgctgtccctgtgcagaatgtatctggggagactgtttctgtcacaccagttcctggacagactttggtcaccatggcaaccgccactgtcacagccaacaatgggcaaacggtaaccattcctgtgcaaggtattgccaatgaaaatggagggataacattcttccctgtccaagtcaatgttggggggcaggcacaagctgtgacaggctccatccagcccctcagtgctcaggccctggctggaagtctgagctctcaacaggtgacaggaacaactttgcaagtccctggtcaagtggccattcaacagatttccccaggtggccaacagcagaagcaaggccagtctgtaaccagcagtagtaatagacccaggaagaccagctctttatcgcttttctttagaaaggtataccatttagcagctgtccgccttcgggatctctgtgccaaactagatatttcagatgaattgaggaaaaaaatctggacctgctttgaattctccataattcagtgtcctgaacttatgatggacagacatctggaccagttattaatgtgtgccatttatgtgatggcaaaggtcacaaaagaagataagtccttccagaacattatgcgttgttataggactcagccgcaggcccggagccaggtgtatagaagtgttttgataaaaggaaaaagaaaaagaagaaattctggcagcagtgatagcagaagccatcagaattctccaacagaactaaacaaagatagaaccagtagagactccagtccagttatgaggtcaagcagcaccttgccagttccacagcccagcagtgctcctcccacacctactcgcctcacaggtgccaacagtgacatggaagaagaggagaggggagacctcattcagttctacaacaacatctacatcaaacagattaagacatttgccatgaagtactcacaggcaaatatggatgctcctccgctctctccctatccatttgtaagaacaggctctcctcgccgaatacagttgtctcaaaatcatcctgtctacatttccccacataaaaatgaaacaatgctttctcctcgtgaaaagattttctactacttcagcaacagtccttcaaagagactaagagaaattaacagtatgatccggacaggagaaactccaaccaaaaagcgagggattcttttggaagacggaagtgaatcacctgcaaaaagaatttgcccagaaaatcattctgccttactgcgccgtctacaagatgtagctaatgaccgaggttcccactga

SEQ ID NO: 123 - DNA, 3521 bp, Unknown
  RAB10, member RAS oncogene family
ggggggcgtgagagggcacggggaaaaggtggctctggccggggtggctcggtttcctggggctatgtaactgagctcgtcgacttaggggtccttcttcgctgccctcgccgcgtgctagcagggagtttccgctcgggagagagactgtcctcacgcccgctgcgcctcctcgacggcagagcaggcttgctcgcccgtgggagcgtcccggccgagaagccctgaggggggaggggaggccattttgtcccgaccgactccccggaaccgggcggagcggctgggagaggctgcggagccgcggtcgccgccctcggaggcactggacgccgccactgtcggggcttcctcaaagctgttcgtaggtcgcccgcgccgtctcgagccttttacccacgcttccccggtcctccggcctgagaacgcccgagtgaggagttggccgtagtgagagggaccgatcccttggggccgccggcggcgagagcccgagccgctcctcccaatggcgaagaagacgtacgacctgcttttcaagctgctcctgatcggggattccggagtggggaagacctgcgtcctttttcgtttttcggatgatgccttcaatactacctttatttccaccataggaatagacttcaagatcaaaacagttgaattacaaggaaagaagatcaagctacagatatgggatacagcaggccaggagcgatttcacaccatcacaacctcctactacagaggcgcaatgggtatcatgctagtatatgacatcaccaatggtaaaagttttgaaaacatcagcaaatggcttagaaacatagatgagcatgccaatgaagatgtggaaagaatgttactgggaaacaagtgtgatatggacgacaaaagagttgtacctaaaggaaaaggaggacagattgcaagggagcatggtattaggttttttgagactagtgcaaaagcaaatataaacatcgaaaaggcgttcctcacgttagctgaagatatccttcgaaagacccctgtaaaagagcccaacagtgaaaatgtagatatcagcagtggaggaggcgtgacaggctggaagagcaaatgctgctgagcattctcctgttccatcagttgccatccactaccccgttttctcttcttgctgcaaaataaaccactctgtccatttttaactctaaacagatatttttgtttctcatcttaactatccaagccacctattttatttgttctttcatctgtgactgcttgctgactttatcataattttcttcaaacaaaaaaatgtatagaaaaatcatgtctgtgacttcatttttaaatgtacttgctcagctcaactgcatttcagttgtattatagtccagttcttatcaacattaaaacctatagcaatcatttcaaatctattctgcaaattgtataagaataaagttagaattaacaattttattttgtacaacagtggaattttctgtcatggataatgtgcttgagtccctataatctatagacatgtgatagcaaaagaaacaaacaaaagccaggaaaacactcattttcgccttgaatatgtaaatgggattaattttgtcctgtgccttatgtggaaaggaacttctttggttttccttttttgttctggtggaagcatgtgcaggagacatatcatccaaacataaaccattaaaatgtttgtggtttgcttggctgtaattttcaaagtagttaattgaggacaaagggtaatgcagaagtgatagctttggtttgctgagtcttgttttaagtggccttgatatttaaaactattcctgccaccatttcttctccttggccacttcttccttgcgtctccctgcatgctgctttatttgcttctccctccccaaccacctcatggtatatttaagagtgaaagggacaaactagtaggtttgtcaagtttaatataaagcactgatgtaacttgctaggtaaacggaaagataagttctaactgcctactatccaatgtcagttaattggtgtcttcccccctcatttgctctcttccctaaaatgtgtcccagatgccttcatttgctgttttacttctatgttctgcttttcctcctctctttgttcccttcctgtctatccattgagtttatgaaatggaagagttaactgcatgcactagtgtttggagggtgttgtggtttgtctttctaattaggtgtatagcctattcactttcctagaataaatctcttaacctaaatttgagtagtctgcattttggcaactcctctagcagcttggtagcctagtacaggttgttttttaaaaaaaggaaaagcaggaaggaggagtgaattttattaacatgtttgccaaatgtattgagatttggcctctgaagaacactttttcagtgttaagtttctttaccttaagattcagaaatactttagaatattattaattttaagtcctgtctttacatccttttggaaaacttgtattaccatgagtttggaaaaaggacaacgaaaggcttttcatgtaaagataagatctttggctatctctaaccctgtccttttttcactgcattttttctagttttgcttcattgcttatcattaggatagggtaagtgaagtttgctatgctgctagcatcctaagatgatacctttgttgaaagaattgtgaatagcatgattcatttctagcagaggctgagtttaggactgcagcttccattgagaagtctttctgtgtcgtgaatagcattttaatgacctcttggctcacataagcaaacaacatagggacgtatctgctatgaaaatccacaaatttttcagatagtgccctaaaaacaattttatatgcctcactggttgttattcttaggttattcccacacttgactttatcattgtttactactagtaaaaagcagcattgccaaataatccctaattttccactaaaaatataatgaaatgatgttaagctttttgaaaagtttaggttaaacctactgttgttagattaatgtatttgttgcttccctttatctggaatgtggcattagcttttttattttaaccctctttaattcttattcaattccatgacttaaggttggagagctaaacactgggatttttggataacagactgacagttttgcataattataatcggcattgtacatagaaaggatatggctaccttttgttaaatctgcactttctaaatatcaaaaaagggaaatgaagtataaatcaatttttgtataatctgtttgaaacatgagttttatttgcttaatattagggctttgccccttttctgtaagtctcttgggatcctgtgtagaagctgttctcattaaacaccaaacagttaagtccattctctggtactagctacaaattcggtttcatattctacttaacaatttaaataaactgaaatatttccaaaaaaaaaaaaaaaaaaaac

SEQ ID NO: 124 - DNA, 603 bp, Unknown
  RAB10 member RAS oncogene family
  exon (1)..(603)
atggcgaagaagacgtacgacctgcttttcaagctgctcctgatcggggattccggagtggggaagacctgcgtcctttttcgtttttcggatgatgccttcaatactacctttatttccaccataggaatagacttcaagatcaaaacagttgaattacaaggaaagaagatcaagctacagatatgggatacagcaggccaggagcgatttcacaccatcacaacctcctactacagaggcgcaatgggtatcatgctagtatatgacatcaccaatggtaaaagttttgaaaacatcagcaaatggcttagaaacatagatgagcatgccaatgaagatgtggaaagaatgttactgggaaacaagtgtgatatggacgacaaaagagttgtacctaaaggaaaaggaggacagattgcaagggagcatggtattaggttttttgagactagtgcaaaagcaaatataaacatcgaaaaggcgttcctcacgttagctgaagatatccttcgaaagacccctgtaaaagagcccaacagtgaaaatgtagatatcagcagtggaggaggcgtgacaggctggaagagcaaatgctgctga

SEQ ID NO: 125 - DNA, 688 bp, Unknown
  No homology
ggaccctcgtgccgtggaaactgagaaaacattttttttcccaaaggcaattactctgcatggcctttttaccctgttatagggccttctttctttccagataataacccacagaatctctttgtgtgctcaagttaagtcattaacggcttgacaaagtgttgttagtgcagaaagcttattctcttcattggttgaatgtaacttccagacattaagtgacccattttgttgttcctgaggctaagaatcattattttcttttggtaccatacagattgtggatttcagtttaatccagaaactcacaactcatgttgaagtaatttctactgagaagtgatttttctagataattgttcaaattttttgattgagtcaacattagatacaacagtgcaacgggcatgctctactgtagagattataaatggaagactttgttcttttagtttacttttcctccttcactaatagtttttgctgaactgttggtttttcctgaacatttcttcagagttaacaacaaagacaagttcaaccattgtcttcccttataaattattaatacaataacatccagctttgttctccttgtgtgtacctccttcttcttaaatgaaaacccatatttgttgaaagaaaatatgaacactaagaaaactttacttaatgatgactaactctg

SEQ ID NO: 126 - DNA, 633 bp, Unknown
  No homology
aggaggtggtacccattttcaggaaaaggaaaaagcattactcacttttcacttctatctatagttagagttctaaagggggctataaccccaacatatcgtgaatggatttgtggagagattgaataataaccagctttaggaggcaggtgaaaatacagaaacaatatgaatatttggtaaagtaaatttaaaaaaatactcttaagggagaaacagtagcaaagagagctacaatcaagatggaagctcttattgggcatatctgctggagagaatggcaaattttgtgtaggatctcagctaataatgacccaaccctgtatttatgcagctaataattaacatgtgggctcagcatgaagtcaactccaaattctcattcttcaataatcaacagtcttccctttcctgtaaaaagaatgactgttggaggccggcccagtggcatagtggttaagttcacatgctgtgctttggtggcctagggttcgcaggtttggatcctgggtgtagaccgacacagcacgcatcaagccatgctgtggcggcattccatgtagaaaaattagaagggcttacaactaggatatacagctatgtgctggggctttggaggggaaaaaaaaaaaa

SEQ ID NO: 127 - DNA, 2728 bp, Yeast; identical to SEQ ID NO: 11

SEQ ID NO: 128 - DNA, 1257 bp, Yeast; identical to SEQ ID NO: 12
  exon (1)..(1257)

SEQ ID NO: 129 - DNA, 839 bp, Unknown
  No homology
  misc_feature (719)..(719): n is a, c, g, or t
agcacagctactacatcaagtacaactaataccactttaactccaactccgcagcctgcgcggaaatccacctttgatgcagccagtttcattggaggaatcgtccttgtcttgggtgtgcaggctgttattttctttctctataaattctgcaaatctaaagaacgaaactaccacactctgtaaacagacccattaaattaacgactggcatataactcactgaaaccaaaatgctatctttcaagatgtcccacatggaagacactattccaagagctttaaatttgcaaaggatgcatataggatattttggagcatcgtccttgaagaaaattagctaaatcattttgctcaacaggaatatttaaaatattctgcatgaatccttgtggctgtcttttcctttaaatggctgctgctgtgggattgtgttctctgttcttgacatgccaaatgtaactctgtaagggatgggaaacattgtcctgcgcagacaacctcatgactctttggcagtttaaatttagtcgttttaaagcctgaaagttgcattattttcatcctaactcaggatgtagtttagtccccagaattgaatagaatgtgccaaaggagaatcaggcagatttttggctgtcatttcaaaatggaataaatttataaatttagtatctttagagtacactgtatccttagagtaaaattttgtgcttganagcagttattttttctacattagaaataagatgccacacaaggaatgacattcccgattgaagagaaatgaatagaaaggatacaaaccatgaaagtgtagcggcttattgttcatactt

SEQ ID NO: 130 - DNA, 618 bp, Unknown
  No homology
  misc_feature (553)..(553): n is a, c, g, or t
tattctaggtacctcacaaaaaatttattatggtgccatggctggtagcttttagtgagtgctgcaagatacaagattcatttgaaaatatacaaaatttccattcctcccaaagtggcaaaagttagctacaaaaattagctataattgtctttacctagatatgaatatcttggcacactttaatgtcaacacatggaacagttttttttgaaaatgtagctaatgaagcttctcatcttctataattttgaatactactctaacaaaatcataatacggaattagattttgcaagaagagctcttaaaacagaactcacagcctttctccctgtgtctttggcaatgtagtatcttgagccattgataatttttgggttttttaatccagaaggtatatagaaaccttttcagatttttcatctgatttgttcacgcaaatgtagttcttatcaaaataccttattttaccttacagatatttgttgcacaggcagacactgctgtatttagaaagttctatttcagttcgttaaaaactgcaaaaccantctgtattatgtaccaactgatttaaaataaatctacatgtttattgaaaaaaaaaaaaaaaaaa

SEQ ID NO: 131 - DNA, 3293 bp, Equus caballus
ggcacgagcggcacgagagcagcagctccgaggctgccctggcgggcaggctgttacggtgcgtcatgctttcacagggccccttctgggcacagaaaatgccaggatgatgccgcccacccgcctggctgggactctgatcccagccatggccttcctctcctgcctgagacccgagagctgggacccttgcgtgcaggtggttcctaacactacttaccaatgcatggacctgaatctctacaaaatccctgagaacatccccacatcaaccaaggaactggacctgagctttaaccccttgaaggagttaggcagccatagcttctccaacttcccagaactgcaggtgctggatttgtccaggtgtgaaattgagatgattgaagatgatgcatatcagggcctcaaccatctctccaccttgatattgacaggaaatcctatcaggagcttagccctgggagccttttctggactctccagtttacagacgctggtggccgtggagacaaagctttcatctctagagaagttccccattggacatctcaagaccttgaaggagcttaatgtggctcataatcttatccattccttcaagttacccgagtatttttctaaaatgcccaacctggagcacttggacctttccaataacaagatccaaaatatttctcatgaagacttgcgtgtgctacatcaaatgcccttactcaacctttctttagacttgtccctgaatcctttagagtttatccaaccagatgcctttaaagaaattaagctccataaactgactttgagaagtaattttgatagtatagatgtaatgaaatcttgtattcaaggactggctggtttaaaagtcaatcggttggttctgggagaatttaaaaatgaaaggaaattggaaagatttgacacatctgccctgcgcggactgcacaatttgacgattgaagaattccggttagcatacattgataattacagctcaaaggattctattgatttacttaattgtttggcagatatttctaaaatttctctggtgagtctggatttaggcaatctaaaagattttcctaaaggtttcggatggcaagacttcgaattggttaactgtagaattgaaggatttcccacattggagctcacctctctcaaaaggttggttttcacttccaacaaagatatgaaatcttttaatgaagttaagctaccaagccttgagtttctagatctcagcagaaatcgcttgagtttcaagtcctgctgttctgaggctgatttgaagacaaccagactgaagcatttagatctgagcttcaatgatgttatttccatgagttcaaacttcatgggcttagagcaactagaacatctggatttccagcattccactttgaaacaggccagtgattttccagtattcttatccctcaaaaacctccgttatcttgatatttcttacactaacacccgagttgtcttccatggcatctttgatggcttggtcagcctccaagtcttgaaaatggctggcaattcttttaaggacaacttccttccaaatatcttcagagagatgactaacctgaccaccctggacctttctaagtgtaacctggaacaggtgtcccaggaggcattttgcttactccctcgacttcgggtgttaaatatgagtcacaataacctcctgttcttggatatgcttccttacaaacctctccattccctccagattctggattgcagttttaatcgtattgtggccttcaagtggcaagaactgcagcattttccaagtagtctagcttccttaaatcttactcaaaatgactttgcttgtgtttgtgaataccagagttttctgcagtgggtcaaggaccagaggcagctcttggtggaagttgaacacttggtgtgtgcaatacccttacagatgcggggcatgcccgtgctgggttttaacaatgccacctgtcagattagcaagactatcgttggcgggtcggttttcagtatactcatggtttctgtcatagcagttctggtctataagttctatttccacctgatgcttcttgctggctgcaaaaagtatgggagaggtgaaagcatctatgatgcctttgttatctactcaagccaggacgaagactgggtgaggaatgaattggtaaagaacttggaggagggggtgcccccctttcaactctgccttcactacagagacttcattcctggtgtggccatcgccgccaacatcatccaggaaggtttccacaaaagccggaaagttattgtcgtggtgtcccagcacttcattcagagccgatggtgtatctttgagtatgagattgcccagacctggcagtttctgagcagtcgtgctggcatcatcttcatcgtcctgcacaagctggagaagtccctgctccggcagcaggtggagctgtatcgccttctcaacaggaacacttacctggagtgggaggacagtgtcctggggcggcacatcttctggagacgactcaggaaagccttgctggatggtaaaccgtggagtccagcaggaacagcagatgcagcagaaagcagacaacatgatgcagaaacctctacctgaggaggaaaaactcctgaggtgcttcttgcccagctggacccaatacttgttcagttaacaactattaaatgctgcaacataccaggcattgtgctaggggcaggtgattctgtcgtgcacaagatacacaggactgctaatccctttgagtttacagtgcagagggaataaatgccgtgctaaaatacagaacctccagggggatgttttaaccaagtcagctaaggagtccgtgccagggaaagtcaactcaactcttaccccatcaaaatgaatcagaactgagagactgggccccagtgagttcagaaaaggacatcgtctcccaagtcttttgaatggaaaccatctcatctttgacatcttagccatcctaaaacaaaacaaagcagttttggtactttcaactgaacagcgtctctgttcaattttcccttttctactgaacacaatttaaattttacttgatgactcagaaggctcctgattcagatcctccctcctctttaaggcagtttccttatgaaggttaaactcttacgactaattcctaaggaaatctgattgatacatattcacaaacatcctggtcattctttagcgtgctctatttattaataaatagcaggttctatttaaaaaaaaaaaaaaaaaa

SEQ ID NO: 132 - DNA, 2532 bp, Equus caballus
  exon (1)..(2532)
atgatgccgcccacccgcctggctgggactctgatcccagccatggccttcctctcctgcctgagacccgagagctgggacccttgcgtgcaggtggttcctaacactacttaccaatgcatggacctgaatctctacaaaatccctgagaacatccccacatcaaccaaggaactggacctgagctttaaccccttgaaggagttaggcagccatagcttctccaacttcccagaactgcaggtgctggatttgtccaggtgtgaaattgagatgattgaagatgatgcatatcagggcctcaaccatctctccaccttgatattgacaggaaatcctatcaggagcttagccctgggagccttttctggactctccagtttacagacgctggtggccgtggagacaaagctttcatctctagagaagttccccattggacatctcaagaccttgaaggagcttaatgtggctcataatcttatccattccttcaagttacccgagtatttttctaaaatgcccaacctggagcacttggacctttccaataacaagatccaaaatatttctcatgaagacttgcgtgtgctacatcaaatgcccttactcaacctttctttagacttgtccctgaatcctttagagtttatccaaccagatgcctttaaagaaattaagctccataaactgactttgagaagtaattttgatagtatagatgtaatgaaatcttgtattcaaggactggctggtttaaaagtcaatcggttggttctgggagaatttaaaaatgaaaggaaattggaaagatttgacacatctgccctgcgcggactgcacaatttgacgattgaagaattccggttagcatacattgataattacagctcaaaggattctattgatttacttaattgtttggcagatatttctaaaatttctctggtgagtctggatttaggcaatctaaaagattttcctaaaggtttcggatggcaagacttcgaattggttaactgtagaattgaaggatttcccacattggagctcacctctctcaaaaggttggttttcacttccaacaaagatatgaaatcttttaatgaagttaagctaccaagccttgagtttctagatctcagcagaaatcgcttgagtttcaagtcctgctgttctgaggctgatttgaagacaaccagactgaagcatttagatctgagcttcaatgatgttatttccatgagttcaaacttcatgggcttagagcaactagaacatctggatttccagcattccactttgaaacaggccagtgattttccagtattcttatccctcaaaaacctccgttatcttgatatttcttacactaacacccgagttgtcttccatggcatctttgatggcttggtcagcctccaagtcttgaaaatggctggcaattcttttaaggacaacttccttccaaatatcttcagagagatgactaacctgaccaccctggacctttctaagtgtaacctggaacaggtgtcccaggaggcattttgcttactccctcgacttcgggtgttaaatatgagtcacaataacctcctgttcttggatatgcttccttacaaacctctccattccctccagattctggattgcagttttaatcgtattgtggccttcaagtggcaagaactgcagcattttccaagtagtctagcttccttaaatcttactcaaaatgactttgcttgtgtttgtgaataccagagttttctgcagtgggtcaaggaccagaggcagctcttggtggaagttgaacacttggtgtgtgcaatacccttacagatgcggggcatgcccgtgctgggttttaacaatgccacctgtcagattagcaagactatcgttggcgggtcggttttcagtatactcatggtttctgtcatagcagttctggtctataagttctatttccacctgatgcttcttgctggctgcaaaaagtatgggagaggtgaaagcatctatgatgcctttgttatctactcaagccaggacgaagactgggtgaggaatgaattggtaaagaacttggaggagggggtgcccccctttcaactctgccttcactacagagacttcattcctggtgtggccatcgccgccaacatcatccaggaaggtttccacaaaagccggaaagttattgtcgtggtgtcccagcacttcattcagagccgatggtgtatctttgagtatgagattgcccagacctggcagtttctgagcagtcgtgctggcatcatcttcatcgtcctgcacaagctggagaagtccctgctccggcagcaggtggagctgtatcgccttctcaacaggaacacttacctggagtgggaggacagtgtcctggggcggcacatcttctggagacgactcaggaaagccttgctggatggtaaaccgtggagtccagcaggaacagcagatgcagcagaaagcagacaacatgatgcagaaacctctacctga

SEQ ID NO: 133 - DNA, 2205 bp, Equus caballus
cccagcagcatggtggtagaacaccccgagttcctcaaggcggggaaggagcctggcctgcagatctggcgcgtggagaagttcgacctggtgcccgtgccccccaacctttacggagacttcttcacaggtgacgcctatgtcatcctgaagacggtgcagctgaggaacgggatcctgcagtacgacctccactactggctgggcaatgagtgcagccaggatgagagcggcgcggccgccatcttcaccgtgcagctggatgactacctgaacggtcgggctgtgcagcaccgcgaggtccagggctttgagtcggccaccttccttggctacttcaagtctggcctcaagtacaagaaaggaggtgtggcatcaggattcaagcatgtggtgcccaatgaggtggtggtgcagaggctcctccaggtcaaagggcggcgtgtggtccgtgctaccgaggtgcccgtatcctgggagagcttcaacaatggcgactgcttcatcctggacctgggcaacaacatctatcagtggtgcggctccaaaagcaaccgatttgagaggctgaaggccacacaggtgtccaagggcatccgggacaacgagcggagcggccgggcccaagtgtccgtgtttgaggaaggcgctgagcccgaggcgatgctccaggtgctgggccccaagccaactctgcccgaagcgactgaggacacagtcaaggaggatgcggccaaccgcaagctggccaagctctacaaggtctccaatggcgcgggccccatggtggtctcccttgtggctgatgagaatcccttcgcccagggggccttgaggtcagaggactgcttcatcctggaccacggcaaagatgggaaaatctttgtctggaaaggcaagcaagccaacatggaggagaggaaggctgccctcaaaacggcctccgacttcatctccaagatggactaccccaagcagacccaggtctccgtccttcccgagggcggtgagaccccgctgttcaggcagttcttcaagaactggcgggacccggaccagacggaaggcctgggcttggcctatctctccagccacatcgcccacgtggagcgcgtgcctttcgatgccgccaccctgcacacctccactgccatggccgcccagcatggcatggatgacgacggcacaggccagaaacagatctggagagtcgaagggtccaacaaagtgcccgtggaccccgccacctacgggcagttctacggtggggacagctacatcattctgtacaactaccgccacggcagccgtcagggacagatcatctacaactggcagggcgcccagtccacccaggatgaggtcgctgcgtctgccatcctgaccgcccagctagatgaggaactgggaggtacccctgtccagagccgtgtggtccaaggcaaggagcctgcccatctcatgagtctatttggcgggaagcccatgatcgtctacaagggtggcacctcccgcgagggtgggcagacggcccccgccagtactcgcctcttccaggtccgggccagcagctctggagccacccgagccgttgagataatccccaaggccggcgcgctgaactccaacgatgcctttgtcctgaaaactccctcggctgcctacctgtgggtgggtgcaggagccagcgaggcggagaagacgggggcccaggagctgctcagggtgctgcgggcccaacctgtgcaggtggcagaaggcagcgagccagacagcttctgggaggccttgggtgggaaggccacctaccgcacgtccccgcggctgaaggacaagaagatggacgcccaccctcctcgcctctttgcctgctccaacaagattggacgttttgtgatcgaagaggtccctggcgagttcatgcaggaagacctggccactgatgacgtcatgctcctggacacctgggaccaggtctttgtctgggtcggaaaggattctcaagacgaggaaaagacggaagccttgacctctgctaagcggtatatcgacacagacccagctcatcgcgataggcgtacccccatcaccgtcgtgaagcaaggctttgagcctccgtccttcgtgggctggttcctcggctgggatgacagctactggtctgtggatcccttggacagggccttggctgagctggctgcctga

SEQ ID NO: 134 - DNA, 2196 bp, Equus caballus
  exon (1)..(2196)
atggtggtagaacaccccgagttcctcaaggcggggaaggagcctggcctgcagatctggcgcgtggagaagttcgacctggtgcccgtgccccccaacctttacggagacttcttcacaggtgacgcctatgtcatcctgaagacggtgcagctgaggaacgggatcctgcagtacgacctccactactggctgggcaatgagtgcagccaggatgagagcggcgcggccgccatcttcaccgtgcagctggatgactacctgaacggtcgggctgtgcagcaccgcgaggtccagggctttgagtcggccaccttccttggctacttcaagtctggcctcaagtacaagaaaggaggtgtggcatcaggattcaagcatgtggtgcccaatgaggtggtggtgcagaggctcctccaggtcaaagggcggcgtgtggtccgtgctaccgaggtgcccgtatcctgggagagcttcaacaatggcgactgcttcatcctggacctgggcaacaacatctatcagtggtgcggctccaaaagcaaccgatttgagaggctgaaggccacacaggtgtccaagggcatccgggacaacgagcggagcggccgggcccaagtgtccgtgtttgaggaaggcgctgagcccgaggcgatgctccaggtgctgggccccaagccaactctgcccgaagcgactgaggacacagtcaaggaggatgcggccaaccgcaagctggccaagctctacaaggtctccaatggcgcgggccccatggtggtctcccttgtggctgatgagaatcccttcgcccagggggccttgaggtcagaggactgcttcatcctggaccacggcaaagatgggaaaatctttgtctggaaaggcaagcaagccaacatggaggagaggaaggctgccctcaaaacggcctccgacttcatctccaagatggactaccccaagcagacccaggtctccgtccttcccgagggcggtgagaccccgctgttcaggcagttcttcaagaactggcgggacccggaccagacggaaggcctgggcttggcctatctctccagccacatcgcccacgtggagcgcgtgcctttcgatgccgccaccctgcacacctccactgccatggccgcccagcatggcatggatgacgacggcacaggccagaaacagatctggagagtcgaagggtccaacaaagtgcccgtggaccccgccacctacgggcagttctacggtggggacagctacatcattctgtacaactaccgccacggcagccgtcagggacagatcatctacaactggcagggcgcccagtccacccaggatgaggtcgctgcgtctgccatcctgaccgcccagctagatgaggaactgggaggtacccctgtccagagccgtgtggtccaaggcaaggagcctgcccatctcatgagtctatttggcgggaagcccatgatcgtctacaagggtggcacctcccgcgagggtgggcagacggcccccgccagtactcgcctcttccaggtccgggccagcagctctggagccacccgagccgttgagataatccccaaggccggcgcgctgaactccaacgatgcctttgtcctgaaaactccctcggctgcctacctgtgggtgggtgcaggagccagcgaggcggagaagacgggggcccaggagctgctcagggtgctgcgggcccaacctgtgcaggtggcagaaggcagcgagccagacagcttctgggaggccttgggtgggaaggccacctaccgcacgtccccgcggctgaaggacaagaagatggacgcccaccctcctcgcctctttgcctgctccaacaagattggacgttttgtgatcgaagaggtccctggcgagttcatgcaggaagacctggccactgatgacgtcatgctcctggacacctgggaccaggtctttgtctgggtcggaaaggattctcaagacgaggaaaagacggaagccttgacctctgctaagcggtatatcgacacagacccagctcatcgcgataggcgtacccccatcaccgtcgtgaagcaaggctttgagcctccgtccttcgtgggctggttcctcggctgggatgacagctactggtctgtggatcccttggacagggccttggctgagctggctgcctga

SEQ ID NO: 135 - DNA, 1783 bp, Equus caballus
ggcacgaggaatcacctgtggttcttcctagttctggtggccgctcctacatgtgccccgtcccaggtgcaactgaaggagtcaggacctggcctggtgaagccctcgcagaccctgtccctcacctgcactgtctctggattctctttgactagttacactgtaggctgggtcgccaggctccaggaaaaggactggaatatgttgcggctatacgtaatagtgggagtgcaaacttcaacccagaccctgaagtcccgagccagcatcaccagggacgcctcaaagagccaagtttatctgacgctgaacagcctgacagtcgaggacacggccgtctattactgtgcgaggtctctgccagtctctggtaatggttatagtttggtgaactattggggccaggcatctgtcaccgtctcatcagtctccaagcagagccccattatcttgcccttggctgcctgctgcaaagacaccaagactactaacatcacactgggctgcctggtcaagggctacttcccggagccagtgaccgtgacctgggatgcagggtcccttaaccggagcaccataaccttccctgccgtctttgaccaaacctctggcctctacaccaccatcagcagggtggtcgcctcggggaagtgggccaagcagaagttcacctgcaacgtggtgcactcccaggagaccttcaacaagaccttcaacgcatgcatcgtgaccttcaccccacccaccgtgaagctcttccactcctcctgcgaccccggcggcgactcccataccaccatccagctcctgtgcctcatctccgactacacccctggcgacatcgacatcgtttggctgatagacgggcagaaggtcgacgagcagttccctcaacacggcctcgtgaagcaggagggcaagctggcctccacacacagcgagctcaacatcacccagggccagtgggcgtccgaaaacacctacacctgccaggtcacttacaaaagacatgatcttttaaggaccaggccccgcaagtgcacagagtctgaaccccgcggtgtgagcgtctacctgagcccgcccagccccctggacctgtacgtctctaaatcgcccaagatcacctgcctggtggtggacctggccaacgtgcagggcttaagcctgaactggtcccgggagagcggggagcccctgcagaagcacacactggcgaccagcgaacaatttaacaagacattctcggtcacgtccaccctgcctgtggacaccaccgactggatcgagggcgagacttacaagtgcaccgtgtcccacccagacctgcccagggaagtcgtgcgctccatcgccaaggcccctggcaagcgtttgtcccccgaggtctacgtgttcctgccgcctgaggaggaccagagctccaaggacaaggtcaccctcacctgcctgatccagaacttcttccccgcggacatctccgtacagtggctgcgtaacaatgtcctaatccagacagaccagcaagccaccacacgccccaaaagccaatggccccgacccgccttcttcgtcttcagccgcctagaggtcagccgggcggaatgggagcagaagaacaaatttgcctgcaaggtggtccacgaggcgctgtcccaaaggaccctccagaaagaggtgtccaaagaccctggtaaatgatgccctctgcccgccgcctcccaccctcccaggctccctcctgctggggtggaggtgggggccagccagacctgctccggtc

SEQ ID NO: 136 - DNA, 1701 bp, Equus caballus
  exon (1)..(1701)
ggcacgaggaatcacctgtggttcttcctagttctggtggccgctcctacatgtgccccgtcccaggtgcaactgaaggagtcaggacctggcctggtgaagccctcgcagaccctgtccctcacctgcactgtctctggattctctttgactagttacactgtaggctgggtcgccaggctccaggaaaaggactggaatatgttgcggctatacgtaatagtgggagtgcaaacttcaacccagaccctgaagtcccgagccagcatcaccagggacgcctcaaagagccaagtttatctgacgctgaacagcctgacagtcgaggacacggccgtctattactgtgcgaggtctctgccagtctctggtaatggttatagtttggtgaactattggggccaggcatctgtcaccgtctcatcagtctccaagcagagccccattatcttgcccttggctgcctgctgcaaagacaccaagactactaacatcacactgggctgcctggtcaagggctacttcccggagccagtgaccgtgacctgggatgcagggtcccttaaccggagcaccataaccttccctgccgtctttgaccaaacctctggcctctacaccaccatcagcagggtggtcgcctcggggaagtgggccaagcagaagttcacctgcaacgtggtgcactcccaggagaccttcaacaagaccttcaacgcatgcatcgtgaccttcaccccacccaccgtgaagctcttccactcctcctgcgaccccggcggcgactcccataccaccatccagctcctgtgcctcatctccgactacacccctggcgacatcgacatcgtttggctgatagacgggcagaaggtcgacgagcagttccctcaacacggcctcgtgaagcaggagggcaagctggcctccacacacagcgagctcaacatcacccagggccagtgggcgtccgaaaacacctacacctgccaggtcacttacaaaagacatgatcttttaaggaccaggccccgcaagtgcacagagtctgaaccccgcggtgtgagcgtctacctgagcccgcccagccccctggacctgtacgtctctaaatcgcccaagatcacctgcctggtggtggacctggccaacgtgcagggcttaagcctgaactggtcccgggagagcggggagcccctgcagaagcacacactggcgaccagcgaacaatttaacaagacattctcggtcacgtccaccctgcctgtggacaccaccgactggatcgagggcgagacttacaagtgcaccgtgtcccacccagacctgcccagggaagtcgtgcgctccatcgccaaggcccctggcaagcgtttgtcccccgaggtctacgtgttcctgccgcctgaggaggaccagagctccaaggacaaggtcaccctcacctgcctgatccagaacttcttccccgcggacatctccgtacagtggctgcgtaacaatgtcctaatccagacagaccagcaagccaccacacgccccaaaagccaatggccccgacccgccttcttcgtcttcagccgcctagaggtcagccgggcggaatgggagcagaagaacaaatttgcctgcaaggtggtccacgaggcgctgtcccaaaggaccctccagaaagaggtgtccaaagaccctggtaaatga

SEQ ID NO: 137 - DNA, 3941 bp, Homo sapiens
ggctagcaaggggcaagatttacccacccctgaccaggataatggctaccacagcctggaggaggaacacagccttctccggatggatccaaaacactgcagagataacccaacacagtttgttcctgctgctggagacattcctggaaacacccaggaatccactgaagaaaaaatagaattattaactacagaggttccacttgctttggaagaagagagcccttctgagggctgtccatctagtgagatacctatggaaaaggagcctggagagggccgaataagtgtagttgattactcatacctagaaggtgaccttcccatttctgccagaccagcttgtagtaacaaactgatagattatattttgggaggtgcatccagtgacctggaaacaagttctgatccagaaggtgaggattgggatgaggaagctgaggatgatggttttgatagtgatagctcactgtcagactcagaccttgaacaagaccctgaagggcttcacctttggaactctttctgcagtgtagatccttataatccccagaactttacagcaacaattcagactgctgccagaattgttcctgaagagccttctgattcagagaaggatttgtctggcaagtctgatctagagaattcctcccagtctggaagccttcctgagacccctgagcatagttctggggaggaagatgactgggaatctagtgcagatgaagcagagagtctcaaactgtggaactcattctgtaattctgatgacccctacaaccctttaaattttaaggctccttttcaaacatcaggggaaaatgagaaaggctgtcgtgactcaaagaccccatctgagtccattgtggccatttctgagtgtcacaccttactttcttgtaaggtgcagctgttggggagccaagaaagtgaatgtccagactcggtacagcgtgacgttctttctggaggaagacacacacatgtcaaaagaaaaaaggtaaccttccttgaagaagttactgagtattatataagtggtgatgaggatcgcaaaggaccatgggaagaatttgcaagggatggatgcaggttccagaaacgaattcaagaaacagaagatgctattggatattgcttgacatttgaacacagagaaagaatgtttaatagactccagggaacatgcttcaaaggacttaatgttctcaagcaatgttgagttggcagcctgtagtcctagctagcatacactacctcttacctgagaggtgtcttttaaaaacaaatcttggcagctgtcctttgacattttttttttagaggaaatgtaacttggatctagtttaatttttttttttgcaacatatcccactcagaaacattcaggtttgaagccagccctgataatgaaggatgaactagtgtgatttctaatcctcccttttttgatttagttggatgtgcttttaaatgtcctttgcctgcatgaggtggaaaggggacctttttgagttgtcattttgcactttcaaaacttattttcttggaaaacaatatttatagggcttaaagcccattttcatttctaatctaaattatgtgtgcctatctgaaaactttgggctctttcttgtttctttcccaaaattcagaagttaatgggcttttatgtttttctatattttttttatttcaatgatttggcctgtctatgttaggctaaaaaataaccttgtgtatgctaccaacttaaagtgcattattttgtgtcacttttttttttcttgtaaaaatgacttggattgaaaatatgtggtagcctttttatttctacattaagttctacctaggatatttccaaggactgccacaaaacccatatgtgcagtactttactactttgggaaagctgcatctttctaccacattttaacatctaatatatttaatttctttgaagagggttctgtgtacgttattgtagttcccagtttaatatagttctttgtatctcttaacaggttgaagttattgcaaaacactctggaaagtaataattacatcataatcatttattttttaaacttaaaagcctagaaatttcctagaaagaaaataggagacatctcagagcaatttggttttggtgtatatgttctcaacagaaaaccagtgttaatgaatatcatgcctcagcactgtcacttttaaaacctgtcaggatcccactgtaaaattggaaatgggcagttctgaattttcacgtttgaaatgtaaaatataaacttcagtcaatatccaggtttattgtgtcctactatttaataatgagagaagtaatggcaaggcctttactttcaggaaaggatagaagtatagattaatgactggaaagttttaatatatttagcccaaaggttactttgaattgaagtctttgcattgactgtttgtgtttggtttatttgtttagctttacaaggtacacataagttaggttgaggggttgttaacccttccgtggtctgctttcattccgtgtgcttcctgtcacaggtaatggaaaacataagtagaataggtgacctcttagttttgaacttatttaagtgtggggatgaatttttcatcagaagtgcttacagggttactacctcagtttacaatctacctggtcattattttatttctatccagttctaagaactgcctccactgtttatatattcataattaaacacattgagaatgcaacactataaaagctggtcaaatttttgcagagcccttattctgtgtgttttttgtttttttcttttttttgagacagagtctcgttcggtcccccagcttggagtgcagtggcgcgatctcggctcactgcaacctccgcctcctgggttcacgcgattctcctgcctcagcctcccgagtagctgggattacaggcacacaccaccacgcccggctaattttttgtgtctttttagtagagacggggtttcgctatgttggccagactggtcttgaactgctgacctcgtgatccgcccgcctcggcctctcaaagtgctgggattctgtgtgttttgtgcacctccactttaggtaatcatagggagcacatttacaggatggtctaataacatgaaaacaggctagtttcaagcaacagcaatgtcggttggaaagcaggcgtcatttgccttgaaaaaagccttttgacaacatacaggcattcttttaaaaccaggctgaaacattttatttccgagacttaacgttgtgtttcctgtttcttaaacctagcacctctgtgtatttgaaaataatgagacatctttcattggattttggaaaattgttccccatgggattctaacctcactaccaaatgagtgaaagcttgattaagagttcttccatatactagcctccttggaagaagtgatcagaaggtgataagaaggacagaaaggactattttaaagttggactgaaggagaaaaaagcaaaattcttgtttcatcccaattctagttagaacaaagttaaacccccgtaatcttaaagagaaaatctttggaggttttaattaaacattttatacatttaaagtcttgttaatggtgctttaagtgtcaatgtagcatgtaaaaggctttgtacagacaggtaaaagttccatttctgagtgatgaaatgtaacacttcttcatctttaacttgaaatcaaaactatcagattttatttttgtataatttaaggaaggtaaagttaggggactagaagactctaaattggcttctacagatcaataatttaaatgtaactagttgggattttatagttaaaattatatttgtgtatataacataactaatctgtaaattgtaataaatatatttgcaattatcaaaaaaaaaaaaaaaaa

SEQ ID NO: 138 - DNA, 1224 bp, Homo sapiens
  exon (1)..(1224)
gctagcaaggggcaagatttacccacccctgaccaggataatggctaccacagcctggaggaggaacacagccttctccggatggatccaaaacactgcagagataacccaacacagtttgttcctgctgctggagacattcctggaaacacccaggaatccactgaagaaaaaatagaattattaactacagaggttccacttgctttggaagaagagagcccttctgagggctgtccatctagtgagatacctatggaaaaggagcctggagagggccgaataagtgtagttgattactcatacctagaaggtgaccttcccatttctgccagaccagcttgtagtaacaaactgatagattatattttgggaggtgcatccagtgacctggaaacaagttctgatccagaaggtgaggattgggatgaggaagctgaggatgatggttttgatagtgatagctcactgtcagactcagaccttgaacaagaccctgaagggcttcacctttggaactctttctgcagtgtagatccttataatccccagaactttacagcaacaattcagactgctgccagaattgttcctgaagagccttctgattcagagaaggatttgtctggcaagtctgatctagagaattcctcccagtctggaagccttcctgagacccctgagcatagttctggggaggaagatgactgggaatctagtgcagatgaagcagagagtctcaaactgtggaactcattctgtaattctgatgacccctacaaccctttaaattttaaggctccttttcaaacatcaggggaaaatgagaaaggctgtcgtgactcaaagaccccatctgagtccattgtggccatttctgagtgtcacaccttactttcttgtaaggtgcagctgttggggagccaagaaagtgaatgtccagactcggtacagcgtgacgttctttctggaggaagacacacacatgtcaaaagaaaaaaggtaaccttccttgaagaagttactgagtattatataagtggtgatgaggatcgcaaaggaccatgggaagaatttgcaagggatggatgcaggttccagaaacgaattcaagaaacagaagatgctattggatattgcttgacatttgaacacagagaaagaatgtttaatagactccagggaacatgcttcaaaggacttaatgttctcaagcaatgttga

SEQ ID NO: 139 - DNA, 1599 bp, Unknown
  Transducin (beta)-like 1X-linked receptor 1
gttttaggattaaataccttttacagatactgaaagtgcctccttttgtggtgtaaaaaacaaattatggtgcaaaaagtaatcactagattgaaatacatgaaggttttttgctttttgacatacgaaaatgtcaagagaaaggccaaagatttgtactttttcacttacaaagcactcctttttcccttaaacttctttctgtcaaattagatttaatgagagagtactatttttaaggagctatctgtttatgtagaatgattttgttaagagtaatgtaaactattattgagtagaggcctaaagaggactgtgcatttttgctatttaaaggaatcacaaatgatcatacttaagtgagcaaaaatgacaagttttactagctaagtagagaaataaatctcaaatgcagcgctacaattttcattatcttaagtacattgtacatttctacagaacctgtgattattctcgcatgataaggatggtacttgcatatggtgaattactactgttgacagtttccgcagaaatcctatttcagtggaccaacattgtggcatggcagcaaatgccaacattttgtggaatagcagcaaatctacaagagaccctggttggtttttcgttttgttttctttgttttttcccccttctcctgaatcagcagggatggaaggagggtagggaagttatgaattactccttccagtagtagctctgaagtgtcacatttaatatcagttttttttaaacatgattctagttaaatgtagaagagagaagaaagaggaagtgttcacttttttaatacactgatttagaaatttgatgtcttatatcagtagttctgaggtattgatagcttgctttatttctgcctttacgttgacagtgttgaagcagggtgaataactagggcatatatttttttttttttgtaagctgtttcatgatgttttctttggaatttccggataagttcaggaaaacattctgcatgttgtatctagtctgatgtacttatccatctcattacaaacaaaaacacacagactgcatttgtagctctgtaatccttgaatacggaagtaaattttcttctttcctgactttgacattgtagctatactgtttccatttttgtttttacaaatcctttgggtctaattctgtgagcctacctatagcactggattaaaatgtctgcatcatttctttagttatccagttaactttaaaactgttgtaaaagtgtaaaccagcccatgacaggtttttgtacatgttaaagaacttcattgttcagttttcatgattattgtgtaaggaagactgatgtagatgttctgtgctgtcctggaccatgttaattacacttacgacgtattttagttccacatcacaatgatttgtccccagtgacccttttatcctttctaggcacatttcttgttgttgttgttgttgcagttcccctttgcattgtattgctttgacaactgtaatttgaatcagatctgaaagaggtccagaataaaatatattttgatattaaaaaaaaaaaaaaaaaaacaaaaaaaaaaaaaaaaaaaa

SEQ ID NO: 140 - DNA, 309 bp, Unknown
  Transducin (beta) like 1X-linked receptor 1
  exon (1)..(309)
atgcagcgctacaattttcattatcttaagtacattgtacatttctacagaacctgtgattattctcgcatgataaggatggtacttgcatatggtgaattactactgttgacagtttccgcagaaatcctatttcagtggaccaacattgtggcatggcagcaaatgccaacattttgtggaatagcagcaaatctacaagagaccctggttggtttttcgttttgttttctttgttttttcccccttctcctgaatcagcagggatggaaggagggtagggaagttatgaattactccttccagtag

SEQ ID NO: 141 - DNA, 1299 bp, Homo sapiens
gcagccagaaacctgcggaaaatggtagcgatggcggctgggccgagtgggtgtctggtgccggcgtttgggctacggttgttgttggcgactgtgcttcaagcggtgtctgcttttggggcagagttttcatcggaggcatgcagagagttaggcttttctagcaacttgctttgcagctcttgtgatcttctcggacagttcaacctgcttcagctggatcctgattgcagaggatgctgtcaggaggaagcacaatttgaaaccaaaaagctgtatgcaggagctattcttgaagtttgtggatgaaaattgggaaggttccctcaagtccaagcttttgttaggagtgataaacccaaactgttcagaggactgcaaatcaagtatgtccgtggttcagaccctgtattaaagcttttggacgacaatgggaacattgctgaagaactgagcattctcaaatggaacacagacagtgtagaagaattcctgagtgaaaagttggaacgcatataaatcttgcttaaattttgtcctatccttttgttaccttatcaaatgaaatattacagcacctagaaaataatttagttttgcttgcttccattgatcagtcttttacttgaggcattaaatatctaattaaatcgtgaaatggcagtatagtccatgatatctaaggagttggcaagcttaacaaaacccattttttataaatgtccatcctcctgcatttgttgataccactaacaaaatgctttgtaacagacttgcggttaattatgcaaatgatagtttgtgataattggtccagttttacgaacaacagatttttaaattagagaggttaacaagacagatgattactatgcctcatgtgctgtgtgctctttgaaaggaatgacagcagactacaaagcaaataagatatactgagcctcaacagattgcctgctcctcagagtctctcctatttttgtattacccagctttctttttaatacaaatgttatttatagtttacaatgaatgcactgcataaaaactttgtagcttcattattgtaaaacatattcaagatcctacagtaagagtgaaacattcacaaagatttgcgttaatgaagactacacagaaaacctttctaaggatttgtgtggatcagatacatacttggcaaatttttgagttttacattcttacagaaaagtccatttaaaagtgatcatttgtaagaccaaaatataaataaaaagtttcaaaaaccaaaaaaaaaaaaaaaaaaaaaaaaaaaaa

SEQ ID NO: 142 - DNA, 498 bp, Homo sapiens
  exon (1)..(498)
  misc_feature (288)..(288): n is a, c, g, or t
atggtagcgatggcggctgggccgagtgggtgtctggtgccggcgtttgggctacggttgttgttggcgactgtgcttcaagcggtgtctgcttttggggcagagttttcatcggaggcatgcagagagttaggcttttctagcaacttgctttgcagctcttgtgatcttctcggacagttcaacctgcttcagctggatcctgattgcagaggatgctgtcaggaggaagcacaatttgaaaccaaaaagctgtatgcaggagctattcttgaagtttgtggatgnaaattgggaaggttccctcaagtccaagcttttgttaggagtgataaacccaaactgttcagaggactgcaaatcaagtatgtccgtggttcagaccctgtattaaagcttttggacgacaatgggaacattgctgaagaactgagcattctcaaatggaacacagacagtgtagaagaattcctgagtgaaaagttggaacgcatataa

SEQ ID NO: 143 - DNA, 551 bp, Unknown
  No homology
ggcacgagtctgaagtcactgattataaagaatatgcaatccatttgggatttattgcatttaaagaaagcagattattaaaacagtaggtatgataaatacagtaagaaaataactttaaatttcaaacaaaacaaagtaaatgaaggacagaattcagtcaataagaataagcaatgtaaaggcaataaagtagctaaatcacttagtgcttaattagatcaaagaaggaaaaagcaactgattcttcctcatgacagtttcccagctagatctgaggattgaagttatttagaaagtatgttttataacaattagaaatataataaagatgtaaatcatgtttattaaaagttaaagttatttgcttagtggtacataaaaggcttcagaaaattcaagtttaacaaaaaatggaagtgtaatcaaagaaagtgcacttaaagctgtttgtcagcaattaaaaagtagcttactattactatactggttactaggagacgacttttcaatcgcaaagagcgtaataataacaattctctttcaaaagt

SEQ ID NO: 144 - DNA, 553 bp, Unknown
  No homology
  misc_feature (549)..(549): n is a, c, g, or t
ggcacgagattgcattccttttggagacctgtttccctggtgacacctctggactttccaggacctgcctggcagcctgagggcacctgggggcagggggccctgagcatgtggggccacgtgcaggcgcgggtgtggcccaaatacggggcagaggtgacatgcagtcacctgatgacttgaaatcagccagtggctgcagaggcctcgcgctgtggcctcattcagtcagacttgactctgttctgcctgagctaggggcttcgggtctgaaggggacgttggctcactggcgcccggccttgggggcgccctggttgcatgggtagaagtgcctgacgaggtccctcttgttgaccttccccatctggttccgcgggatctcttccaccagcagaagctccgagggcaccacgtacggggccatgacgtctcttgcccactctttgagctccctgtgggacagcgagtgtccctcttgaagggtcactactgcagtgacccgctggccccacgtcatgtccggaactccaatcacagccacatctngtga

SEQ ID NO: 145 - DNA, 1433 bp, Unknown
  Membrane-spanning 4-domains, subfamily A, member 6A, transcript variant 1
gggaggtaagtagaaaccgttgatgggactgagaaaccagagttaaaacctctttggagcttctgagggctcagctggaaccaacgggcacagttggcagcaccatcatgatgtcacaacccaagaccaatgagaccttcatagctctcacaccaaatggcatcagcttcctccaaacagaggatcccaaacttaccaacaagaggcaggacagcctgaagaaacatctaaaggcagaggtcaaagttctcgggactatccagatcctgtgtgggatgatggtgttgagtttgggaattattttggcatcggcttccttctctcagcattttacccaagcgttttctattctgttgaaggctgcttacccattcataggagccttgtgttttgtcatctctggatctctatcaatcatcacagagaaaaagtccactaagcctttggttcagagcagcctagctgcaaacattctgagctctctatcagctctggtgggtttcatcctcctttctgtcaaacaggccaccttaaatcctgcctcactgcagtgtgagttggacaaaaataatataccaacaagaagttatgtttcttacttttatcatgattcactttataccacggactgctatacagccaaagccagtctggctggatccctctctctgatgctgatttgcactctgctggaattctgcctagctgtgctcactgctgtgctgcggtggaaacaggcttactctgacttccctgggagtgtacttttcctgcctcacagttacattggtaattctggcatgtcctcaaaaatgactcatgactgtggatatgaagaactattgacttcttaagaaaaaagggagaaatattaatcagaaagttgattcttatgataatatggaaaagttaaccattatagaaaagcaaagcttgagtttcctaaatgtaagcttttaaagtaatgaacattaaaaaaaaccattatttcactgtcatttaagatatgtgttcattggggatctcttgatttgcctgacattgacttcagcaaaagcacggggctgtaaattaccatttactagattagccaaatagtctgaatttccagaaaacaaggcagaatgatcattcccagaaacatttcccagaaaatgtttcccagaaaactagacagaatgatcattcaatggatcacagtgaagcaaaggacacaactttttattgtaccccttaattgtcaacaggagttaactgatttgttgtggtgctcagacttttttatacaggtgctagtgttttatcctatgtattttaactcattagtgcataaaggcaagccccatataatgaagtctcagggtatatgaaagtagctggcttcaaaataaaatttttgagtgcaaaaaaaaaaaaaaaaaaaaaaaaaaaaa

SEQ ID NO: 146 - DNA, 747 bp, Unknown
  Membrane-spanning 4-domains, subfamily A, member GA, transcript variant 1
  exon (1)..(747)
atgatgtcacaacccaagaccaatgagaccttcatagctctcacaccaaatggcatcagcttcctccaaacagaggatcccaaacttaccaacaagaggcaggacagcctgaagaaacatctaaaggcagaggtcaaagttctcgggactatccagatcctgtgtgggatgatggtgttgagtttgggaattattttggcatcggcttccttctctcagcattttacccaagcgttttctattctgttgaaggctgcttacccattcataggagccttgtgttttgtcatctctggatctctatcaatcatcacagagaaaaagtccactaagcctttggttcagagcagcctagctgcaaacattctgagctctctatcagctctggtgggtttcatcctcctttctgtcaaacaggccaccttaaatcctgcctcactgcagtgtgagttggacaaaaataatataccaacaagaagttatgtttcttacttttatcatgattcactttataccacggactgctatacagccaaagccagtctggctggatccctctctctgatgctgatttgcactctgctggaattctgcctagctgtgctcactgctgtgctgcggtggaaacaggcttactctgacttccctgggagtgtacttttcctgcctcacagttacattggtaattctggcatgtcctcaaaaatgactcatgactgtggatatgaagaactattgacttcttaa

SEQ ID NO: 147 - DNA, 255 bp, Unknown
  No homology
gcagtcatattttattcattgcttgggcaattcgaaattgccatcgcccccgtctgtccccaccattgattctaaggtgacataagaactggtgataaatctaaactgttttacctcttaaatgccacatcatagatcacagttgccaaagagaagataacgaaccatctattgaaggaaatggaggctatcgtcatggcaggggagcagtcctgtgcgggtgtttaaggcatcccactgtagactcttctctcg

SEQ ID NO: 148 - DNA, 2413 bp, Unknown
  GM2 ganglioside activator
gttaactccgccctgacccacccttcccgatgcagtccctgatgcaggctccgttcctgatcgccctgggcttgcttctcgcggcccctgcgcaagcccacctgaaaaagccatcccagctccgtagcttttcctgggataactgtgatgaggggaaggaccctatggtgctcaaaagcctgactctggaacctgaccccattgccgttcctgggaacgtgaccctcagtgtcgtgggcagcaccagtgtccccctgagttctcctctgaaggtggatttagttttggagaaggaggtggctggcctctggatcaagatcccatgcacagactacattggcagctgtacctttgaacacttctgtgatgtgcttgacatgttaattcctactgggcagccctgcccagagcccctgcacacctttgggcttccctgccactgtcccttcaaagaaggcacctactcactgcccaagagtactttccccttgcctgacctggagctgcccagctggctcagcaacgggaactaccgtgtccagagcatcctgagcagcggtgggaaacgtctgggctgtgtcaagatcactgcctctctaaagggcatatagcatggcatctgccacagcagaatggagcggtgtgaggaaggtcccttttcctctgttttgtgtttgccaaggccaaactcccactctctgcccccctttaatcccctttctacagtgagtccactaccctcactgaaaatcattttgtaccacttacattttaggctggggcaagcagccctgacctaagggagaatgagttggacagttcttgatagcccagggcatctgctgggctgaccacgttactcatccccgttaacattctctctaaagagcctcgttcatttccaaagcagttaaggaatgggaaccagagtgttttaggacctgaagaatctttatgactctctctctttcactctttttttttttgtcactaagttaaaagcgaagtgagagtattaacgtttttgttctcctccggccccctgttacaatgaaggggcaaaagtatttgctcttagtctattcctcccttaacttctgtgactaatttttatttcctttctagatttgcccaattaatactagggtgcagtgtatcctggagaggtagggtgtgtgggggaggaatcccttgggggagatattaggagtgctctgttgtttacaaactcaggtacccgcagggcctagcaagagacttaaatgactgataagaaccgtgagaaacatgttgcttccaggcttgatttcgatttttcgctttttttttttgggacggagtctcgctttgtcaccaggctggagtgcagtggtgcaatctcacctcactgcaacctccgcctcctgggttcaagcaattctcctgcctcagcctcccaagtagcttggactacaggccctgccaccacgcccggctaatttgtgtatttttagtagagatggggtttcaccatgttggccaggatggtctcgatctcttgacctcgtgatccgtccaccttggccttgcaaagcgctggattacaggcatgagccactacacccagccgatttttcctttttgattaaagatgctattacaatgtaaatatttcttacacagaaagtcacagcacatgtgcccattgatacaaggctgctgaggcctggtctccagttggaaatataattaagggtggcagggactggagtcagttggagagtgcatagccagtctgtgaagacaactgccagatactggcaatactccagcctggtgacagagtgagactctgtctcaaaaaaaaagtttcaatgtttactcctagagaagccaaaaatccagatttgtatatgaaatcttaccattttaaaagattggcagctaattatttttttaaaaagctgtgcagtgtgatgtgtcccaaacggactggctcatgggtggccacgtcacaacctctgatctcagaccgtgcatgccttgtcctcttaagacaactcctgtggcaccgtttctccctccacagggccaaagccatagtgtccggtcccaaggacaaggctcttccagtgctaggagaggtatgagcagcctctcacctgtgagctgtggggatcacaaggctgcctgcctcagtcttggagtcctgttgggtgaatgaggcagatgggaaagagcctcaccagcagctgcttttggagcaggggtccaaggaagagagggtggcctcgacatcaaactgcctggatttttctaccaccctgttacatcataacaacttctgaaacacacaccagccctgagttctgggctcatttgaagcctggaatagcaataaatctttttaacttgcaaaaaaaaaaaaaaaaaa

SEQ ID NO: 149 - DNA, 582 bp, Unknown
  GM2 ganglioside activator
  exon (1)..(582)
atgcagtccctgatgcaggctccgttcctgatcgccctgggcttgcttctcgcggcccctgcgcaagcccacctgaaaaagccatcccagctccgtagcttttcctgggataactgtgatgaggggaaggaccctatggtgctcaaaagcctgactctggaacctgaccccattgccgttcctgggaacgtgaccctcagtgtcgtgggcagcaccagtgtccccctgagttctcctctgaaggtggatttagttttggagaaggaggtggctggcctctggatcaagatcccatgcacagactacattggcagctgtacctttgaacacttctgtgatgtgcttgacatgttaattcctactgggcagccctgcccagagcccctgcacacctttgggcttccctgccactgtcccttcaaagaaggcacctactcactgcccaagagtactttccccttgcctgacctggagctgcccagctggctcagcaacgggaactaccgtgtccagagcatcctgagcagcggtgggaaacgtctgggctgtgtcaagatcactgcctctctaaagggcatatag

SEQ ID NO: 150 - DNA, 255 bp, Unknown
  No homology
ggggtttctcccctcctttccctttacccgcagtatcaagcacaagaattgttggattaaaaaaagaactgatatcttagaacccgaaagaatcaattgaataggataaatcagtacgtcagtggtggagcttttgcctgtagcttgagaggggaaaggtgggagggaaaggagaaaacgaaagctgaaacacatctcttgggtcctcctgttccgttttcaaggaccagtcagcttcccatcatagttttgccg

SEQ ID NO: 151 - DNA, 591 bp, Unknown
  Fc-epsilon-receptor gamma-chain
cagaacggccgatctccagcccaagatgattccagcagtggtcttgctcttactccttttggttgaacaagcagcggccctgggagagcctcagctttgctatattctggatgccatcctgttcttgtatggtattgtcctcaccctgctctactgtcgactcaagatccaggtgcgaaaggcagctatagccagctatgagaaatcagatgccgtttacacgggcttgagtacccggacccaggagacttatgagactctgaagcatgagaaaccgccacagtaactttagaatagatgcggtcatattcttctttggcttctggttcttccagccctcatggttggcatcacacatgtctccctgccattaatgctagctgaccctacccctgtaatgatgctatgccccccattaacggacatcagtggttcctcttccctgttaaacacctatgctcagatgctattcattaatgtttatattctagtctcactctcttgtcccacccttcttctcttccccattcccaactccagctaaaatatgggaagggagaacccccaataaaactgccatggactggactc

SEQ ID NO: 152 - DNA, 261 bp, Unknown
  Fc-epsilon receptor gamma-chain
  exon (1)..(261)
atgattccagcagtggtcttgctcttactccttttggttgaacaagcagcggccctgggagagcctcagctttgctatattctggatgccatcctgttcttgtatggtattgtcctcaccctgctctactgtcgactcaagatccaggtgcgaaaggcagctatagccagctatgagaaatcagatgccgtttacacgggcttgagtacccggacccaggagacttatgagactctgaagcatgagaaaccgccacagtaa

SEQ ID NO: 153 - DNA, 1568 bp, Unknown
  Minor histocompatibility antigen H13 isoform 1 (H13)
cgtggctttccctgcagagccggtgtctccgcctgcgtccctgctgcagcaaccggagctggagtcggatcccgaacgcaccctcgccatggactcggccctcagcgatccgcataacggcagtgccgaggcaggcggccccaccaacagcactacgcggccgccttccacgcccgagggcatcgcgctggcctacggcagcctcctgctcatggcgctgctgcccatcttcttcggcgccctgcgctccgtacgctgcgcccgcggcaagaatgcttcagacatgcctgaaacaatcaccagccgggatgccgcccgcttccccatcatcgccagctgcacactcttggggctctacctctttttcaaaatattctcccaggagtacatcaacctcctgctgtccatgtatttcttcgtgctgggaatcctggccctgtcccacaccatcagccccttcatgaataagttttttccagccagctttccaaatcgacagtaccagctgctcttcacacagggttctggggaaaacaaggaagagatcatcaattatgaatttgacaccaaggacctggtgtgcctgggcctgagcagcatcgttggcgtctggtacctgctgaggaagcactggattgccaacaacctttttggcctggccttctcccttaatggagtagagctcctgcacctcaacaatgtcagcactggctgcatcctgctgggcggactcttcatctacgatgtcttctgggtatttggcaccaatgtgatggtgacagtggccaagtccttcgaggcaccaataaaattggtgtttccccaggatctgctggagaaaggcctcgaagcaaacaactttgccatgctgggacttggagatgtcgtcattccagggatcttcattgccttgctgctgcgctttgacatcagcttgaagaagaatacccacacctacttctacaccagctttgcagcctacatcttcggcctgggccttaccatcttcatcatgcacatcttcaagcatgctcagcctgccctcctatacctggtccccgcctgcatcggttttcctgtcctggtggcgctggccaagggagaagtgacagagatgttcagttatgaggagtcaaatcctaaggatccagcggcagtgacagaatccaaagagggaacagaggcatcagcatcgaaggggctggagaagaaagagaaatgatgcagctggtgcccgagcctctcagggccagaccagacagatgggggctgggcccacacaggcgtgcaccggtagagggcacaggaggccaagggcagctccaggacagggcagggggcagcaggatacctccagccaggcctctgtggcctctgtttccttctccctttcttggccctcctctgctcctccccacaccctgcaggcaaaagaaacccccagcttcccccctccccgggagccaggtgggaaaagtgggtgtgatttttagattttgtattgtggactgattttgcctcacattaaaaactcatcccatggccagggcgggccactgtgctcctgg

SEQ ID NO: 154 - DNA, 1134 bp, Unknown
  Minor histocompatability complex antigen H13 isoform 1
  exon (1)..(1134)
atggactcggccctcagcgatccgcataacggcagtgccgaggcaggcggccccaccaacagcactacgcggccgccttccacgcccgagggcatcgcgctggcctacggcagcctcctgctcatggcgctgctgcccatcttcttcggcgccctgcgctccgtacgctgcgcccgcggcaagaatgcttcagacatgcctgaaacaatcaccagccgggatgccgcccgcttccccatcatcgccagctgcacactcttggggctctacctctttttcaaaatattctcccaggagtacatcaacctcctgctgtccatgtatttcttcgtgctgggaatcctggccctgtcccacaccatcagccccttcatgaataagttttttccagccagctttccaaatcgacagtaccagctgctcttcacacagggttctggggaaaacaaggaagagatcatcaattatgaatttgacaccaaggacctggtgtgcctgggcctgagcagcatcgttggcgtctggtacctgctgaggaagcactggattgccaacaacctttttggcctggccttctcccttaatggagtagagctcctgcacctcaacaatgtcagcactggctgcatcctgctgggcggactcttcatctacgatgtcttctgggtatttggcaccaatgtgatggtgacagtggccaagtccttcgaggcaccaataaaattggtgtttccccaggatctgctggagaaaggcctcgaagcaaacaactttgccatgctgggacttggagatgtcgtcattccagggatcttcattgccttgctgctgcgctttgacatcagcttgaagaagaatacccacacctacttctacaccagctttgcagcctacatcttcggcctgggccttaccatcttcatcatgcacatcttcaagcatgctcagcctgccctcctatacctggtccccgcctgcatcggttttcctgtcctggtggcgctggccaagggagaagtgacagagatgttcagttatgaggagtcaaatcctaaggatccagcggcagtgacagaatccaaagagggaacagaggcatcagcatcgaaggggctggagaagaaagagaaatga

SEQ ID NO: 155 - DNA, 483 bp, Unknown
  No homology
gcacgagctcgtgccgaattcggcacgaggaaattcctaacaagagaaattcccatgcatcggtggtaggtctaaacaagcagctttccagatttggaatcagttgagaagagaaatagtggggcgggcagctctttggagaaagccacgttctcctagggcccctgcatctactgagctttgccctgttgctaaccatctctagtcttgtccttggcatgattcttttgtaatagaagttttattttttgtgcacctcagctgatcatgtgaaagagagtctgatcattggaagagccgtgctagtttcacagatgggctccttaaattaaaactgggtggttatgattgggctgatctgacctctgatactacagtgaaactagtgtgggagaaaccagcttttactgtttaaaaatcactgctttactctgttaatttacaaggaaaggaatgactgtgccaataaaagtgttctccttc

SEQ ID NO: 156 - DNA, 1022 bp, Unknown
  CD68 protein
agcagctggtactgagacgagcctagctgaactttgggtgaggctggtctgtcatgaggctggctgtgcttttctcaggggccttgctggggctactagcagcccaggagacagggaatgactgtcctcataaaaaatcagccactctgctgccatccttcacggtgacccctacagctacagaaagcacagcaagccctggaacaacgagccaccaaactacccagagccacagaaccaccaccacaggcaccaccagcgaccaccccacaacagccactcacaatcctaccaccaccagtcatggaaacaccacagttcatccaacgacaagcaacagtactgtcaccagcccaggatcagccagcagttccccccacccaagaccacctccgccctctccaagtcctagtccaggctccaaggaggctataggagattacatttggactaatggttcccagccctgcgtccggctccaagcccagattcagattcgagttctgtacccaaccctgggtggaggaaaggcctggggcatctctgtactgaaccccaacaaaaccaaggcccaggggggctgtgcccatccccacttacttctctcattcccctacggacagctcagctttggattcaagcaggagccactgcagagcactgtctacctgaactatatcgctgtggagtacaacgtgtccttcccacaggcagcgcagtggacattcttggttcagaattcatcccttcgagatctccaagcccccctaggccagagattcagttgcagaaacgcaagcatcgctctttcaccagctttccaccttgacctgctctccctgaagctacaagctgctcagctgacccccacaggagcctttgggccaagtttctcttgtcccagtgaccagtccatcttgctgcctctcatcatcggcctgatcctcctcggcctcttcgccctggtcctcattaccttctgtgtcatccggagacgcccacccacctaccagccactctga

SEQ ID NO: 157 - DNA, 969 bp, Unknown
  CD68 protein
  exon (1)..(969)
atgaggctggctgtgcttttctcaggggccttgctggggctactagcagcccaggagacagggaatgactgtcctcataaaaaatcagccactctgctgccatccttcacggtgacccctacagctacagaaagcacagcaagccctggaacaacgagccaccaaactacccagagccacagaaccaccaccacaggcaccaccagcgaccaccccacaacagccactcacaatcctaccaccaccagtcatggaaacaccacagttcatccaacgacaagcaacagtactgtcaccagcccaggatcagccagcagttccccccacccaagaccacctccgccctctccaagtcctagtccaggctccaaggaggctataggagattacatttggactaatggttcccagccctgcgtccggctccaagcccagattcagattcgagttctgtacccaaccctgggtggaggaaaggcctggggcatctctgtactgaaccccaacaaaaccaaggcccaggggggctgtgcccatccccacttacttctctcattcccctacggacagctcagctttggattcaagcaggagccactgcagagcactgtctacctgaactatatcgctgtggagtacaacgtgtccttcccacaggcagcgcagtggacattcttggttcagaattcatcccttcgagatctccaagcccccctaggccagagattcagttgcagaaacgcaagcatcgctctttcaccagctttccaccttgacctgctctccctgaagctacaagctgctcagctgacccccacaggagcctttgggccaagtttctcttgtcccagtgaccagtccatcttgctgcctctcatcatcggcctgatcctcctcggcctcttcgccctggtcctcattaccttctgtgtcatccggagacgcccacccacctaccagccactctga

SEQ ID NO: 158 - DNA, 2621 bp, Unknown
  Transglutaminase E3
cctttagaggagcctgagaagaggcagaggaagggcgaaacatggctgctctaggagtccagagtatcaactggcagaaggccttcaaccgacaagcgcatcacacagacaagttctccagccaggagctcatcttgcggagaggccaaaacttccaggtcttaatgatcatgaacaaaggccttggctctaacgaaagactggagttcattgacaccacagggccttacccctcagagtcggccatgacgaaggctgtgtttccactctccaatggcagtagtggtggctggagtgcggtgcttcaggccagcaatggcaatactctgactatcagcatctccagtcctgccagcgcacccataggacggtacacaatggccctccagatcttctcccagggcggcatctcctctgtgaaacttgggacgttcatactgctttttaacccctggctgaatgtggatagcgtctttatgggtaaccatgctgagagagaagagtatgttcaggaagatgccggcatcatctttgtgggaagcacaaaccgaattggcatgattggctggaactttggacagtttgaagaagacattctcagcatctgcctctcaatcttggataggagtctgaatttccgccgtgacgctgctactgatgtggccagcagaaatgaccccaaatacgttggccgggtgctgagtgccatgatcaatagcaatgatgacaatggtgtgcttgctgggaattggagcggcacttacaccggtggccgggacccaaggagctgggacggcagcgtggagatcctcaaaaattggaaaaaatctggcttcagcccagtccgatatggccagtgctgggtctttgctgggaccctcaacacagcgctgcggtctttggggattccttcccgggtgatcaccaacttcaactcagctcatgacacagaccgaaatctcagtgtggatgtgtactacgaccccatgggaaaccccctggacaagggtagtgatagcgtatggaatttccatgtctggaatgaaggctggtttgtgaggtctgacctgggccccccgtacggtggatggcaggtgttggatgctaccccgcaggaaagaagccaaggggtgttccagtgcggccccgcttcggtcattggtgttcgagagggtgatgtgcagctgaacttcgacatgccctttatcttcgcggaggttaatgccgaccgcatcacctggctgtacgacaacaccactggcaaacagtggaagaattccgtgaacagtcacaccattggcaggtacatcagcaccaaggcggtgggcagcaatgctcgcatggacgtcacggacaagtacaagtacccagaaggctctgaccaggaaagacaagtgttccaaaaggctttggggaaacttaaacccaacacgccatttgccgcgacgtcttcgatgggtttggaaacagaggaacaggagcccagcatcatcgggaagctgaaggtcgctggcatgctggcagtaggcaaagaagtcaacctggtcctactgctcaaaaacctgagcagggatacgaagacagtgacagtgaacatgacagcctggaccatcatctacaacggcacgcttgtacatgaagtgtggaaggactctgccacaatgtccctggaccctgaggaagaggcagaacatcccataaagatctcgtacgctcagtatgagaggtacctgaagtcagacaacatgatccggatcacagcggtgtgcaaggtcccagatgagtctgaggtggtggtggagcgggacatcatcctggacaaccccaccttgaccctggaggtgctgaacgaggctcgtgtgcggaagcctgtgaacgtgcagatgctcttctccaatccactggatgagccggtgagggactgcgtgctgatggtggagggaagcggcctgctgttgggtaacctgaagatcgacgtgccgaccctagggcccaaggagcggtcccgggtacgttttgagatcctgcccacccggagtggcaccaagcagctgcttgctgacttctcctgcgacaagttccctgcaatcaaggccatgctgtccatcgacgtggctgagtgaagggctcaggcggcccccatacaaacttgggtaacacagagcaggcagggctcacctgtggagtgagccccctgcccatgctgtccagcctgggaaacccactccgtcccccaaggctgccagacatggactccgggctccagcacatccccctctcctctcccccaggttggggctggcttcaccctggcccgtgacttgatcacttttgcacattccctggctgtttctccccgaggctgcctgctctgtgagccccacagccctgctcattcctcacgcccatcaatgctgcaggacagagtggcacctgacccagcgaccctccgaatggatgctcagggagaagtcggtctggactgtttgctgatccccagcctgcagttgggacattcgtgctactccctcaggccactgtggaggggaggggatggttagtcacctgccccagcactcacaccctaactcaaaataaatgttaaataagtgcgatcacac

SEQ ID NO: 159 - DNA, 2082 bp, Unknown
  Transglutaminase E3
  exon (1)..(2082)
atggctgctctaggagtccagagtatcaactggcagaaggccttcaaccgacaagcgcatcacacagacaagttctccagccaggagctcatcttgcggagaggccaaaacttccaggtcttaatgatcatgaacaaaggccttggctctaacgaaagactggagttcattgacaccacagggccttacccctcagagtcggccatgacgaaggctgtgtttccactctccaatggcagtagtggtggctggagtgcggtgcttcaggccagcaatggcaatactctgactatcagcatctccagtcctgccagcgcacccataggacggtacacaatggccctccagatcttctcccagggcggcatctcctctgtgaaacttgggacgttcatactgctttttaacccctggctgaatgtggatagcgtctttatgggtaaccatgctgagagagaagagtatgttcaggaagatgccggcatcatctttgtgggaagcacaaaccgaattggcatgattggctggaactttggacagtttgaagaagacattctcagcatctgcctctcaatcttggataggagtctgaatttccgccgtgacgctgctactgatgtggccagcagaaatgaccccaaatacgttggccgggtgctgagtgccatgatcaatagcaatgatgacaatggtgtgcttgctgggaattggagcggcacttacaccggtggccgggacccaaggagctgggacggcagcgtggagatcctcaaaaattggaaaaaatctggcttcagcccagtccgatatggccagtgctgggtctttgctgggaccctcaacacagcgctgcggtctttggggattccttcccgggtgatcaccaacttcaactcagctcatgacacagaccgaaatctcagtgtggatgtgtactacgaccccatgggaaaccccctggacaagggtagtgatagcgtatggaatttccatgtctggaatgaaggctggtttgtgaggtctgacctgggccccccgtacggtggatggcaggtgttggatgctaccccgcaggaaagaagccaaggggtgttccagtgcggccccgcttcggtcattggtgttcgagagggtgatgtgcagctgaacttcgacatgccctttatcttcgcggaggttaatgccgaccgcatcacctggctgtacgacaacaccactggcaaacagtggaagaattccgtgaacagtcacaccattggcaggtacatcagcaccaaggcggtgggcagcaatgctcgcatggacgtcacggacaagtacaagtacccagaaggctctgaccaggaaagacaagtgttccaaaaggctttggggaaacttaaacccaacacgccatttgccgcgacgtcttcgatgggtttggaaacagaggaacaggagcccagcatcatcgggaagctgaaggtcgctggcatgctggcagtaggcaaagaagtcaacctggtcctactgctcaaaaacctgagcagggatacgaagacagtgacagtgaacatgacagcctggaccatcatctacaacggcacgcttgtacatgaagtgtggaaggactctgccacaatgtccctggaccctgaggaagaggcagaacatcccataaagatctcgtacgctcagtatgagaggtacctgaagtcagacaacatgatccggatcacagcggtgtgcaaggtcccagatgagtctgaggtggtggtggagcgggacatcatcctggacaaccccaccttgaccctggaggtgctgaacgaggctcgtgtgcggaagcctgtgaacgtgcagatgctcttctccaatccactggatgagccggtgagggactgcgtgctgatggtggagggaagcggcctgctgttgggtaacctgaagatcgacgtgccgaccctagggcccaaggagcggtcccgggtacgttttgagatcctgcccacccggagtggcaccaagcagctgcttgctgacttctcctgcgacaagttccctgcaatcaaggccatgctgtccatcgacgtggctgagtga

SEQ ID NO: 160 - DNA, 2636 bp, Unknown
  Bos taurus similar to hypothetical protein (LOC515494)
gaggcactgtggcccacccagataggattattttcccgaatcctgcctgtgaggacccaccagcggtgctcttggaagtgcaaggcaccttacagaggcctgtgggccgggacagccgcagctcccctgccaactgtacctggctcatcctgggcaggaaggagcagacggtaacggtcaggttccaaaaactgcatctggcctgtggctcagagcgcttaaccctgcgctcccccatccagccgcagatctccctgtgcgaggcacctgccagccctctgcaactgcctggaggcaacgtcaccatcacctacagctatgtcggggccagagctcccatgggccagggcttcctgctctcttacagccaagattggctgatgtgcctgcaggaggagttccagtgcctgaaccaccgctgtgtgcccctgctccagcgctgtgatggggtcgacgcctgtggcgatggctctgacgaggcaggttgcagctcagaccccttccctgacttggccctagcccctgtcctcaccccaccctgcaatcacaccttagaagacttctatggggtcttctcctccttcggatactcacacctggcctcagtctcccacccccagtcttgccgctggctgctggacccacgtgatggccggcgcctggcagtgcgcttcacggccttggatctaggctatgacgatgcagtgcgtgtatatgacggcgcggggcccctcgagaccctccgactgctgcgcagcctcacccgcttcagtaatggcaaggctgtcactgtggagacgctgtctggccaggccacagtggactaccgcacagtcccttggagcactggtcggggcttcaatgccacctaccatgtgcggggctactgcttgccttgggaccgaccgtgcggcttaagctctggcttgggggctagcgaaggcctcggcgagcgctgctacagcgaggcacagcgctgcgacggctcatgggactgtgcagatggcacggacgaggagaactgccccagctgcccacctggacactacccctgtggggccgccggcacccctggggccacagcctgctacctgcccactgaccgctgtaactaccagaccttctgtgccgatggagcagatgagagacgctgtcgccactgccagccaggcaacttccggtgccgggatgagaagtgcgtgtatgagacgtgggtgtgcgacgggcagccggactgtgctgatggcagtgacgagtgggactgctcctacgccctgccccgcaaggtcattaccgctgccgtcattggcagccttgtgtgcggcttgctgctggtcatcgccctgggctgcacctgcaagctctatgccattcgcacccaggagtacagcatcttcgcccccctctcccggatggaggccgagattgtgcagcagcaggcgcctccctcctacgggcagctcattgcccagggcgccatccctcctgtagaggacttccctacagagaaccctaatgataactctgttctgggcaatctgcgttctctgctacagatcctgcgccaggacatgactccagggagcacctctggtgcccgccgccgccagcggggccgctctatgcgccgcctggtgcgccgtcttcgccgctggggcttgcttccccgaaccaaccccccagcccggacccctgaaaccagatcccaggccacaccatccactgctcctcctgagaccttagatggcagcacaggtccagcccatgagggcggggcagtgggtgggcaagatggggatcaggcacccccgctgcctgtcaaggctccactgccacctgccagcacatccccagcctgtcctactgtccctgaagccccagggccactgcctgcggtgcccttggagccatcactgctgtctggagtggtacaggccctgcgaggccgcctcctgcccagcctgcggccccctggaccaacccgggcgtcacctggaccccacacaacagtcctgtccccagaggatgaggacgatgtgctgctggtgccactggctgaacctggggtctgggtggtcgaagcggaggatgagccactgctggcctgaggtgacctagctcccttgggcattctgttcacagggacagcaaccctatagagggcagctcagcttcccatccactacttccttccttgtccctcagtctgaggggacttgatgggcctcctgttgatcccaggtagctgctatcaagttaggtgtccctcagacagggagagggccctcacagagctccccctgcgcatggccagagaccacagtccaccaccaccctctccccacactgccaccggttggtggctgtttttaaaaagtaaagttcttaaagggtcatgggcctggacactccatccttgccaaacccatccaaaagtggccttaagcaccagaatgccaactggctggagacctccagcccccaagggaggatttgggcagggcctgaggttttgccaacagtgatccctcctacaaggcctggctcataaaaagagcacaacaaatgcttctgtcccatagctaggttgttgcccaggaagccaaggttgaaaaataaaggaatcagaaatttca

SEQ ID NO: 161 - DNA, 3129 bp, Unknown
  Ring finger protein 10
cgactcgtcgccattcccggagcaggtcggcctcggcccaggggcgagtatccgttgctgtgtcggagacactagtccccgacaccgagacagccagccctctcccctgcctcgcggcgggagagcgtgtccggccggccggccggcggggctcgcgcaacctccctcgcctccccttcccccgcagcctccgccccgccaggcccggcccggactcccgagccccggcctcctcgtcctcggtcgccgctgccgccgggcttaacagccccgtccgccgcttctcttcctagtttgagaagccaaggaaggaaacagggaaaaatgtcgccatgaaggccgagaaccgctgccgccgccgacccccgccggccctgaacgccatgagcctgggtccccgccgcgcccgctccgctccgactgccgtcgccgccgaggcccccgttgatgccgctgagctcccccaacgccgccgccaccgcctccgacatggacaagaacagcggctccaacagctcctccgcctcttcgggcagcagcaaagggcaacagccgccccgctccgcctcggcggggccagccggcgagtctaaacccaagagcgatggaaagaactccagtggatccaagcgttataatcgcaaacgtgaactttcctaccccaaaaatgaaagttttaacaaccagtcccgtcgctccagttcacagaaaagcaagacttttaacaagatgcctcctcaaaggggcggcggcagcagcaaactctttagctcttcttttaatggtggaagacgagatgaggtagcagaggctcaacgggcagagtttagccctgcccagttctctggtcctaagaagatcaacctgaaccacttgttgaatttcacttttgaaccccgtggccagacgggtcactttgaaggcagtggacatggtagctggggaaagaggaacaagtggggacataagccttttaacaaggaactctttttacaggccaactgccaatttgtggtgtctgaagaccaagactacacagctcattttgctgatcctgatacattagttaactgggactttgtggaacaagtgcgcatttgtagccatgaagtgccatcttgcccaatatgcctctatccacctactgcagccaagataacccgttgtggacacatcttctgctgggcatgcatcctgcactatctttcactgagtgagaagacgtggagtaaatgtcccatctgttacagttctgtgcataagaaggatctcaagagtgttgttgccacagagtcacatcagtatgttgttggtgataccattacgatgcagctgatgaagagggagaaaggggtgttggtggctttgcccaaatccaaatggatgaatgtagaccatcccattcatctaggagatgaacagcacagccagtactccaagtttctgctggcctctaaggagcaggtgctgcaccgggtagttctggaggagaaagtagcactagagcagcagctggcagaggagaagcacactcccgagtcctgctttattgaggcagctatccaggagctcaagactcgggaagaggctctgtcgggattggccggaagcagaagggaggtcactggtgttgtggctgctctggaacaactggtgctgatggctcccttggcgaaggagtctgtttttcaacccaggaagggtgtgctggagtatctgtctgccttcgatgaagaaaccacggaagtttgttctctggacactccttctagacctcttgctctccctctggtagaagaggaggaagcagtgtctgaaccagagcctgaggggttgccagaggcctgtgatgacttggagttagcagatgacaatcttaaagaggggaccatttgcactgagtccagccagcaggaacccatcaccaagtcaggcttcacacgcctcagcagctctccttgttactacttttaccaagcggaagatggacagcatatgttcctgcaccctgtgaatgtgcgctgcctcgtgcgggagtacggcagcctggagaggagccccgagaagatctcagcaactgtggtggagattgctggctactccatgtctgaggatgttcgacagcgtcacagatatctctctcacttgccactcacctgtgagttcagcatctgtgaactggctttgcaacctcctgtggtctctaaggaaaccctagagatgttctcagatgacattgagaagaggaaacgtcagcgccaaaagaaggctcgggaggaacgccgccgagagcgcaggattgagatagaggagaacaagaaacagggcaagtacccagaagtccacattcccctcgagaatctacagcagtttcctgccttcaattcttatacctgctcctctgattctgctttgggtcccaccagcaccgagggccatggggccctctccatttctcctctcagcagaagtccaggttcccatgcagactttctgctgacccctctgtcacccactgccagtcagggcagtccctcattctgcgttgggagtctggaagaagactctcccttcccttcctttgcccagatgctgagggttggaaaagcaaaagcagatgtgtggcccaaaactgctccaaagaaagatgagaacagcttagttcctcctgcccctgtggacagcgacggggagagtgataattcagaccgtgttcctgtgcccagttttcaaaattccttcagccaagctattgaagcagccttcatgaaactggacacaccagctacttcagatcccctctctgaagagaaaggaggaaagaaaagaaaaaaacagaaacagaagctcctgttcagcacctcagtcgtccacaccaagtgacactactggcccaggctaccttctccatctggtttttgtttttgtttttttttcccccatgcttttgtttggctgctgtaatttttaagtatttgagtttgaacagattagctctggggggagggggtttccacaatgtgagggggaaccaagaaaattttaaatacagtgtattttccagcttcctgtctttacaccaaaataaagtattgacacaagagaaaaaaaaaaaaaaaaaaaaaaaaa

SEQ ID NO: 162 - DNA, 2436 bp, Unknown
  Ring finger protein 10
  exon (1)..(2436)
atgccgctgagctcccccaacgccgccgccaccgcctccgacatggacaagaacagcggctccaacagctcctccgcctcttcgggcagcagcaaagggcaacagccgccccgctccgcctcggcggggccagccggcgagtctaaacccaagagcgatggaaagaactccagtggatccaagcgttataatcgcaaacgtgaactttcctaccccaaaaatgaaagttttaacaaccagtcccgtcgctccagttcacagaaaagcaagacttttaacaagatgcctcctcaaaggggcggcggcagcagcaaactctttagctcttcttttaatggtggaagacgagatgaggtagcagaggctcaacgggcagagtttagccctgcccagttctctggtcctaagaagatcaacctgaaccacttgttgaatttcacttttgaaccccgtggccagacgggtcactttgaaggcagtggacatggtagctggggaaagaggaacaagtggggacataagccttttaacaaggaactctttttacaggccaactgccaatttgtggtgtctgaagaccaagactacacagctcattttgctgatcctgatacattagttaactgggactttgtggaacaagtgcgcatttgtagccatgaagtgccatcttgcccaatatgcctctatccacctactgcagccaagataacccgttgtggacacatcttctgctgggcatgcatcctgcactatctttcactgagtgagaagacgtggagtaaatgtcccatctgttacagttctgtgcataagaaggatctcaagagtgttgttgccacagagtcacatcagtatgttgttggtgataccattacgatgcagctgatgaagagggagaaaggggtgttggtggctttgcccaaatccaaatggatgaatgtagaccatcccattcatctaggagatgaacagcacagccagtactccaagttgctgctggcctctaaggagcaggtgctgcaccgggtagttctggaggagaaagtagcactagagcagcagctggcagaggagaagcacactcccgagtcctgctttattgaggcagctatccaggagctcaagactcgggaagaggctctgtcgggattggccggaagcagaagggaggtcactggtgttgtggctgctctggaacaactggtgctgatggctcccttggcgaaggagtctgtttttcaacccaggaagggtgtgctggagtatctgtctgccttcgatgaagaaaccacggaagtttgttctctggacactccttctagacctcttgctctccctctggtagaagaggaggaagcagtgtctgaaccagagcctgaggggttgccagaggcctgtgatgacttggagttagcagatgacaatcttaaagaggggaccatttgcactgagtccagccagcaggaacccatcaccaagtcaggcttcacacgcctcagcagctctccttgttactacttttaccaagcggaagatggacagcatatgttcctgcaccctgtgaatgtgcgctgcctcgtgcgggagtacggcagcctggagaggagccccgagaagatctcagcaactgtggtggagattgctggctactccatgtctgaggatgttcgacagcgtcacagatatctctctcacttgccactcacctgtgagttcagcatctgtgaactggctttgcaacctcctgtggtctctaaggaaaccctagagatgttctcagatgacattgagaagaggaaacgtcagcgccaaaagaaggctcgggaggaacgccgccgagagcgcaggattgagatagaggagaacaagaaacagggcaagtacccagaagtccacattcccctcgagaatctacagcagtttcctgccttcaattcttatacctgctcctctgattctgctttgggtcccaccagcaccgagggccatggggccctctccatttctcctctcagcagaagtccaggttcccatgcagactttctgctgacccctctgtcacccactgccagtcagggcagtccctcattctgcgttgggagtctggaagaagactctcccttcccttcctttgcccagatgctgagggttggaaaagcaaaagcagatgtgtggcccaaaactgctccaaagaaagatgagaacagcttagttcctcctgcccctgtggacagcgacggggagagtgataattcagaccgtgttcctgtgcccagttttcaaaattccttcagccaagctattgaagcagccttcatgaaactggacacaccagctacttcagatcccctctctgaagagaaaggaggaaagaaaagaaaaaaacagaaacagaagctcctgttcagcacctcagtcgtccacaccaagtga

SEQ ID NO: 163 - DNA, 375 bp, Unknown
  No homology
  misc_feature (96)..(96): n is a, c, g, or t
ctggccatagcattaacccctcgcccggcccggacacaaggaggaagctcctaggggccaggggcaggactgtggagggacaggcttcccctcacnccacccactccctccttctgccccctcccacatgcccgcctcgcctcccaccaggactctagccccagagtggctccagaaggtcccccgggcgtctgaccccagcgaagggccagccttgcttggttcagctgggggtgcttgcttgggagttcgaagtcaccctaatcacgtaaatggaactctccttttcgagcatctctcccttcccacaccttcctccgttagcttccccaaaagaattgtgttattaaacttattctcaatgagtcctcctgc

SEQ ID NO: 164 - DNA, 595 bp, Unknown
  No homology
  misc_feature (7)..(7): n is a, c, g, or t
cactgcncaggacccaactctgaatacatttttgaaatgttaactcccttttgcagaagggaaacctaagtatcagagaggttgccctacgaacagacagcatgccagggacagaattaggattgagattcaacctggccttaccccaatttgacccattcccacccaggaagctgaagataaaagattagggaaaatgcaaagaacaagggcagttttctttgcccaagccttcggtgctagttagctctcacccactcagcctgcacatcttctcagcaaaaacttggaatgaaggaggtgacacaaggaagtcaatgggaggggggaggcaataatccccacctgtctaaaaaccacaggaacctaacctgatgctctttcggccccatctgcatcaacactaaacaactaccaactcccttaatctttcacacatgccaagtgaacatttttgaagatttctctctgtgactgcaaccacctgcaaaccaggacgaatctagaagttctctttttttttttttggtttaatttctaatctcttgttgtttatgaggtgtggggtttataagggactgaatcaaatgaatgt

SEQ ID NO: 165 - DNA, 1338 bp, Unknown
  Lymphocyte surface antigen precursor CD44
tctaaagcgggacccccagctccactggctcggcttcgccgtcgctcccacaccatggacaagttttggtggcgcgcagcctggggactctgcctcgtgccgctgagcctggcgcagatcgatttgaacataacctgccgatacgcaggggtattccatgtggagaaaaatggccgctacagcatctcgcggacggaggccgcggacctgtgcaaggctttcaacagcaccctgcccaccatggcccagatgcagaaagcactgaacattggctttgagacctgcaggatcgggttcatagaagggcacgtggtcatccccccgatccaccccaactccatctgtgccgccaacaacacgggcgtgtacatcctcacgtccaacacctctcagtacgacacctattgcttcaatgcctcagctccgcccgaagaagactgcacctcggtcacagacctgcccaacgccttcgagggacccattaccataactatcgttaaccgtgatggcactcgctacaccaagaaaggcgagtacagaactaaccctgaagacatcaaccccagcacccctgcggatgacgacgtgagcagtgggtcctccagcgaaagaagcacttcaggaggctacagcatcttccacacccaccttccaaccactcgccccacccaagaccagagcagtccctgggtgtctgacagcccagagaagactcccactaccaaagaccgagcctctggcgggagggcccagaccacccacggatctgaaacaagtggacactcgactgggagtcaagaaggtggggcaagcacaacctcgggtcccatacggagacctcaaattccagaatggctgatcatcttggcgtccctcctggccctggctctgattctcgcagtttgcattgctgtcaacagtcgaagaaggtgtggacagaagaagaagctggtgatcaacaatggcaatggagctgtggacgacagaaaggcaagtgggctcaatggagaggccagcaggtctcaggagatggtgcacttggtgaacaaggagtcgtcagagacccaagaccagtttatgacagccgacgagacacggaacctgcagaatgtggacatgaagattggggtgtagcacctgcaccttgaccttggaacaaaccacagtcagagacagacaatcacagggggctgggacatttcacagatgtgatgtgctactgactgcttcattcgggtctttttttaacataaaattttctactccttaaaaaaaaaaaaaaaaaaaaaaaaaaaaaaaaaaaaaaaaaaaaaaaaaaaaaaaaaaaactttagagca

SEQ ID NO: 166 - DNA, 1080 bp, Unknown
  Lymphocyte surface antigen precursor CD44
  exon (1)..(1080)
atggacaagttttggtggcgcgcagcctggggactctgcctcgtgccgctgagcctggcgcagatcgatttgaacataacctgccgatacgcaggggtattccatgtggagaaaaatggccgctacagcatctcgcggacggaggccgcggacctgtgcaaggctttcaacagcaccctgcccaccatggcccagatgcagaaagcactgaacattggctttgagacctgcaggatcgggttcatagaagggcacgtggtcatccccccgatccaccccaactccatctgtgccgccaacaacacgggcgtgtacatcctcacgtccaacacctctcagtacgacacctattgcttcaatgcctcagctccgcccgaagaagactgcacctcggtcacagacctgcccaacgccttcgagggacccattaccataactatcgttaaccgtgatggcactcgctacaccaagaaaggcgagtacagaactaaccctgaagacatcaaccccagcacccctgcggatgacgacgtgagcagtgggtcctccagcgaaagaagcacttcaggaggctacagcatcttccacacccaccttccaaccactcgccccacccaagaccagagcagtccctgggtgtctgacagcccagagaagactcccactaccaaagaccgagcctctggcgggagggcccagaccacccacggatctgaaacaagtggacactcgactgggagtcaagaaggtggggcaagcacaacctcgggtcccatacggagacctcaaattccagaatggctgatcatcttggcgtccctcctggccctggctctgattctcgcagtttgcattgctgtcaacagtcgaagaaggtgtggacagaagaagaagctggtgatcaacaatggcaatggagctgtggacgacagaaaggcaagtgggctcaatggagaggccagcaggtctcaggagatggtgcacttggtgaacaaggagtcgtcagagacccaagaccagtttatgacagccgacgagacacggaacctgcagaatgtggacatgaagattggggtgtag

SEQ ID NO: 167 - DNA, 1736 bp, Unknown
  WD repeat domain 1, transcript variant 2
tccggacgcgtgggtcgacgcagcgcgggccggccccggaggctctcggcgagcgcggcgcggtaacaagtgggcgaggatgccgtacgagatcaagaaggtgttcgccagcctcccgcaggtggagaggggcgtctccaagatcatcggcggcgaccctaagggcaacaattttctgtacaccaatggaaagtgcgtcatcctaaggaacatcgacgaccacagccgctttgtcaactgtgtgcgattctctcctgatgggaacagatttgccacagccagtgctgacggccagatatacatctatgacgggaagactggggagaaggtgtgcgcgctgggcggaagcaaggcccacgacggtgggatttacgcaattagttggagtcccgacagcacccatttgctttctgcttctggggacaaaacttccaagatttgggacgtcagcgtgaactccgtggtcagcacatttcccatgggctccacggttctggaccagcagctgggctgcctatggcagaaggaccacctgctcagtgtctccctgtccgggtacatcaactatctggacagaaacaaccccagcaagcccctgcacgtcatcaagggtcacagtaaatcgatccagtgtctgacggtgcataaaaacggcggcaagtcctacatttactctgggagccacgacggacacattaattactgggattcagagacgggggagaacgactccttcgctgggaaaggccacacgaaccaggtgtccaggatgaccgtggatgagtcggggcagctcatcagctgcagcatggacgacaccgtgcggtacaccagcctcatgctgcgggactacagcggacaaggagttgtgaaactggacgttcagccaaagtgcgtagccgtcggccccgggggatacgccgtggtcgtgtgcattggacagattgtcctgctgaaggatcagaggaagtgcttcagcatcgacaaccccggctacgagcccgaagttgtggcagtgcaccccggcggggacacggtggcaattgggggtgtggacggcaacgtccgcctgtattccatcctgggcaccacgctgaaggatgagggcaagctcctagaggccaagggccccgtgaccgacgtggcctactcccacgacggcgccttcctcgcggtgtgcgacgccagcaaggtggtcacagtgttcagcgttgctgacggctactcggagaacaatgttttttatggacaccatgcaaaaatcgtctgcctggcctggtccccagacaatgaacactttgcctccggtggcatggacatgatggtgtatgtttggaccctgagtgacccggaaaccagagtcaagatccaagatgcacaccggctgcaccatgtcagcagcctggcctggctggacgagcacacgctggtcacgacctcccatgatgcctctgtcaaggagtggacaatcacctactgaggagccccacccccgcctctggatggaccgaatcagggactagagtttaactgcagcggaacatgtcatttctctatttctgtgacgcgcccccatgcccccaccccaccacaagaggcaggagggcccagtcatgaccctcgtctctgcagggtgtctgtacacgttcttctgaaagctttagacagtaacagtttgcacatgaaaaataaagcgagcacctaaaaaaaaaaaaaaaaaaaaaaaaaaaaaaaaa

SEQ ID NO: 168 - DNA, 1401 bp, Unknown
  WD repeat domain 1, transcript variant 2
  exon (1)..(1401)
atgccgtacgagatcaagaaggtgttcgccagcctcccgcaggtggagaggggcgtctccaagatcatcggcggcgaccctaagggcaacaattttctgtacaccaatggaaagtgcgtcatcctaaggaacatcgacgaccacagccgctttgtcaactgtgtgcgattctctcctgatgggaacagatttgccacagccagtgctgacggccagatatacatctatgacgggaagactggggagaaggtgtgcgcgctgggcggaagcaaggcccacgacggtgggatttacgcaattagttggagtcccgacagcacccatttgctttctgcttctggggacaaaacttccaagatttgggacgtcagcgtgaactccgtggtcagcacatttcccatgggctccacggttctggaccagcagctgggctgcctatggcagaaggaccacctgctcagtgtctccctgtccgggtacatcaactatctggacagaaacaaccccagcaagcccctgcacgtcatcaagggtcacagtaaatcgatccagtgtctgacggtgcataaaaacggcggcaagtcctacatttactctgggagccacgacggacacattaattactgggattcagagacgggggagaacgactccttcgctgggaaaggccacacgaaccaggtgtccaggatgaccgtggatgagtcggggcagctcatcagctgcagcatggacgacaccgtgcggtacaccagcctcatgctgcgggactacagcggacaaggagttgtgaaactggacgttcagccaaagtgcgtagccgtcggccccgggggatacgccgtggtcgtgtgcattggacagattgtcctgctgaaggatcagaggaagtgcttcagcatcgacaaccccggctacgagcccgaagttgtggcagtgcaccccggcggggacacggtggcaattgggggtgtggacggcaacgtccgcctgtattccatcctgggcaccacgctgaaggatgagggcaagctcctagaggccaagggccccgtgaccgacgtggcctactcccacgacggcgccttcctcgcggtgtgcgacgccagcaaggtggtcacagtgttcagcgttgctgacggctactcggagaacaatgttttttatggacaccatgcaaaaatcgtctgcctggcctggtccccagacaatgaacactttgcctccggtggcatggacatgatggtgtatgtttggaccctgagtgacccggaaaccagagtcaagatccaagatgcacaccggctgcaccatgtcagcagcctggcctggctggacgagcacacgctggtcacgacctcccatgatgcctctgtcaaggagtggacaatcacctactga

SEQ ID NO: 169 - DNA, 581 bp, Unknown
  No homology
gatggaagtcagaagccaagctttctccccaccctctgtgggccgcacgtacacacacacacacacacacacacacaggcgcacacacacacacacactttgcgtatctgagcgcgcccctcgcactgggtcttatcttgcaccttcttcaggattttatatgtgaagagatttttatatagaattttttccccaaaacactttataccttttaaaaagcagtacctggtggccgtgtgcctccacactggcctgggctctgtctacagccacctgcctgggcttctgggcctgtggccctgcccggggtctggtgggggcccagcagcggccatggcagggtggactctgtgggagaggcagggggccagccaccctacctcccactaactacttcctgccctgggggacccacaccctggggctctggcggagggacagatggacagagggagccagcagctgtccccaggccgtacctcctcctctggaggtgctgggcgtggaagcgctggagccaccccgtgaaggtgcctctcctctgctccatgagccttcttaacttaataaaatgttccggc

SEQ ID NO: 170 - DNA, 487 bp, Unknown
  No homology
ctctggacggagcaagctcttgccatcagactgcactgcctgcgggaggaagagagtctaatggctttaggtgtctgggggctcgttatggcctaatgcccacttttgtcctgatcctcctcctgcgcagaatagagaactgcactgaataatagttaatacttaatgttctctattaacttactgctcacacgtaacagtctggtggggaaatgcgattcattcatttaaatcccgagtaagcctcgggggtattgactgaagatgccataagcagtcaaaccaaagcattccatttgtagagttagatgggacgctccagatatttgaatctcttcacttgataggaaaggaaacagacccagggagagaacgtcgctgctgtatactgtaacgtctgtgttcaagtacctcacgggatagaggaaagatggtcttaagttttgggaattaaaagaaaaatatcttttaataaatatatattttt

SEQ ID NO: 171 - DNA, 528 bp, Unknown
  Ferritin light chain
atgagctcccagattcgtcagaattattctactgaagtggaggccgccgtcaaccgcctggtcaacctgtacctgcgggcctcctacacctacctctctctgggcttctatttcgaccgcgacgatgtggctctggagggcgtatgccacttcttccgcgagttggcggaggagaagcgcgagggtgccgagcgtctcttgaagatgcaaaaccagcgcggcggccgcgctctcttccaggacttgcagaagccgtcccaggatgaatggggtacaaccctggatgccatgaaagccgccattgtcctggagaagagcctgaaccaggcccttttggatctgcatgccctgggttctgcccaggcagacccccatctctgtgacttcttggagagccacttcctagacgaggaggtgaaactcatcaagaagatgggcgaccatctgaccaacatccagaggctcgttggctcccaagctgggctgggcgagtatctctttgaaaggctcaccctcaagcacgactaa

SEQ ID NO: 172 - DNA, 528 bp, Unknown; identical to SEQ ID NO: 171
  Ferritin light chain
  exon (1)..(528)

SEQ ID NO: 173 - DNA, 2521 bp, Unknown
  TAP2E'
gttgggagagacggagcggacctcagcgctgaagcagaagtccccggagctgcggtctccccgccgcggctgagccatgcggctccctgacctgagaccctggacctccctgctgctggtggacgcggctttactgtggctgcttcagggccctctggggactttgcttcctcaagggctgccaggactatggctggaggggaccctgcggctgggagggctgtgggggctgctaaagctaagagggctgctgggatttgtggggacactgctgctcccgctctgtctggccacccccctgactgtctccctgagagccctggtcgcgggggcctcacgtgctcccccagccagagtcgcttcagccccttggagctggctgctggtggggtacggggctgcggggctcagctggtcactgtgggctgttctgagccctcctggagcccaggagaaggagcaggaccaggtgaacaacaaagtcttgatgtggaggctgctgaagctctccaggccggacctgcctctcctcgttgccgccttcttcttccttgtccttgctgttttgggtgagacattaatccctcactattctggtcgtgtgattgacatcctgggaggtgattttgacccccatgcctttgccagtgccatcttcttcatgtgcctcttctcctttggcagctcactgtctgcaggctgccgaggaggctgcttcacctacaccatgtctcgaatcaacttgcggatccgggagcagcttttctcctccctgctgcgccaggacctcggtttcttccaggagactaagacaggggagctgaactcacggctgagctcggataccaccctgatgagtaactggcttcctttaaatgccaatgtgctcttgcgaagcctggtgaaagtggtggggctgtatggcttcatgctcagcatatcgcctcgactcaccctcctttctctgctgcacatgcccttcacaatagcagcggagaaggtgtacaacacccgccatcaggaagtgcttcgggagatccaggatgcagtggccagggcggggcaggtggtgcgggaagccgttggagggctgcagaccgttcgcagttttggggccgaggagcatgaagtctgtcgctataaagaggcccttgaacaatgtcggcagctgtattggcggagagacctggaacgcgccttgtacctgctcgtaaggagggtgctgcacttgggtgtgcagatgctgatgctgagctgtgggctgcagcagatgcaggatggggagctcacccagggcagcctgctttcctttatgatctaccaggagagcgtggggagctatgtgcagaccctggtatacatatatggggatatgctcagcaacgtgggagctgcagagaaggttttctcctacatggaccgacagccaaatctgccttcacctggcacgcttgcccccaccactctgcagggggttgtgaaattccaagacgtctcctttgcatatcccaatcgccctgacaggcctgtgctcaaggggctgacgtttaccctacgtcctggtgaggtgacggcgctggtgggacccaatgggtctgggaagagcacagtggctgccctgctgcagaatctgtaccagcccacagggggacaggtgctgctggatgaaaagcccatctcacagtatgaacactgctacctgcacagccaggtggtttcagttgggcaggagcctgtgctgttctccggttctgtgaggaacaacattacttatgggctgcagagctgcgaagatgataaggtgatggcggctgcccaggctgcccacgcagatgagttcatcaaagaaatggagcatggactacaaacagatgtaggggagaaaggaagccagttggctgtgggacagaaacaatgtctggccattgctcgggcccttgtgcggaacccacgagtcctcatcctggatgaagccaccagtgccctggacgtccagtgtgagcaggctctgcaggactggatatcccgtggggaccgaacggtgctggtgatcgctcacaggctgcagacggttcagaacgctgaccagatcctggtgctcaggcagggagagctggtggatcatgcccagctcatggagggggaggacctctattcccgcctggtgcagcagtgtctggaggactgaggctgaagggacactgggcccttctcatggctgtcttcatgacctggagtagctcctgctttgagtttccctggggctgttcccctgggtagtttttcctggagttggagacatgatggagatttggaccttgtgtgcttttggtggggtagagaggtggggtggggtggggtgggggctgtctgtgtccaggaaacttaattccctggtgactagagctttgcctggtgatgaggagtattttgtggcataatacatatattttaaaatattttccttcttacatgaactgtatacattcatatagaaaatttagacaatataaaaaaaaaa

SEQ ID NO: 174 - DNA, 2112 bp, Unknown
  TAP2E
  exon (1)..(2112)
atgcggctccctgacctgagaccctggacctccctgctgctggtggacgcggctttactgtggctgcttcagggccctctggggactttgcttcctcaagggctgccaggactatggctggaggggaccctgcggctgggagggctgtgggggctgctaaagctaagagggctgctgggatttgtggggacactgctgctcccgctctgtctggccacccccctgactgtctccctgagagccctggtcgcgggggcctcacgtgctcccccagccagagtcgcttcagccccttggagctggctgctggtggggtacggggctgcggggctcagctggtcactgtgggctgttctgagccctcctggagcccaggagaaggagcaggaccaggtgaacaacaaagtcttgatgtggaggctgctgaagctctccaggccggacctgcctctcctcgttgccgccttcttcttccttgtccttgctgttttgggtgagacattaatccctcactattctggtcgtgtgattgacatcctgggaggtgattttgacccccatgcctttgccagtgccatcttcttcatgtgcctcttctcctttggcagctcactgtctgcaggctgccgaggaggctgcttcacctacaccatgtctcgaatcaacttgcggatccgggagcagcttttctcctccctgctgcgccaggacctcggtttcttccaggagactaagacaggggagctgaactcacggctgagctcggataccaccctgatgagtaactggcttcctttaaatgccaatgtgctcttgcgaagcctggtgaaagtggtggggctgtatggcttcatgctcagcatatcgcctcgactcaccctcctttctctgctgcacatgcccttcacaatagcagcggagaaggtgtacaacacccgccatcaggaagtgcttcgggagatccaggatgcagtggccagggcggggcaggtggtgcgggaagccgttggagggctgcagaccgttcgcagttttggggccgaggagcatgaagtctgtcgctataaagaggcccttgaacaatgtcggcagctgtattggcggagagacctggaacgcgccttgtacctgctcgtaaggagggtgctgcacttgggtgtgcagatgctgatgctgagctgtgggctgcagcagatgcaggatggggagctcacccagggcagcctgctttcctttatgatctaccaggagagcgtggggagctatgtgcagaccctggtatacatatatggggatatgctcagcaacgtgggagctgcagagaaggttttctcctacatggaccgacagccaaatctgccttcacctggcacgcttgcccccaccactctgcagggggttgtgaaattccaagacgtctcctttgcatatcccaatcgccctgacaggcctgtgctcaaggggctgacgtttaccctacgtcctggtgaggtgacggcgctggtgggacccaatgggtctgggaagagcacagtggctgccctgctgcagaatctgtaccagcccacagggggacaggtgctgctggatgaaaagcccatctcacagtatgaacactgctacctgcacagccaggtggtttcagttgggcaggagcctgtgctgttctccggttctgtgaggaacaacattacttatgggctgcagagctgcgaagatgataaggtgatggcggctgcccaggctgcccacgcagatgagttcatcaaagaaatggagcatggactacaaacagatgtaggggagaaaggaagccagttggctgtgggacagaaacaatgtctggccattgctcgggcccttgtgcggaacccacgagtcctcatcctggatgaagccaccagtgccctggacgtccagtgtgagcaggctctgcaggactggatatcccgtggggaccgaacggtgctggtgatcgctcacaggctgcagacggttcagaacgctgaccagatcctggtgctcaggcagggagagctggtggatcatgcccagctcatggagggggaggacctctattcccgcctggtgcagcagtgtctggaggactga

SEQ ID NO: 175 - DNA, 627 bp, Unknown
  No homology
ctgtgcggacaagcagccactgatcaggcaggatgcccagtggccaatacaggcacagggtggcaggtacggggcagtgtatggggggcatgaggggcatgggctgacagggagctggatgggttgggggtcatgagggcacccagcatggttgagtctggagtggacaggtgtggggaaggccttccttgaaggagcccatccagagcctctctcaacctctgctgaccactgagtgaccagacccccagcctgggtgctcaggacaggtgtggggagcaggttgggccaggctgggctgggagagggaagtagagggaggaacccacaggcagatgctcaccctgcagaccctcccacttcccaggaggacacctcctcctcccccgacagacactcgcaggcaggtctgtgggttcaggttcatgtttattattaccccgtggcggtcacgtagctcagggccttgtagtgcaggttgcctgtggcatccatggtcgccaactggaacgtctggtccacctgcgagtgggtttggtctggaagtcaggcccaggcagagggagggagcaaaggctccgcggggcctgcagccactgggggaattacacgcgctgaactccaggg

SEQ ID NO: 176 - DNA, 1763 bp, Unknown
  COP9 constitutive photomorphogenic homolg subunit 7A
gcccggtgcgctggaggtcgaagcttccaggtagcggcccgcagagcctgacccaggctctggacatcctgagcccaagtcccccacactcagtgcagtgatgagtgcggaagtgaaggtgacagggcagaaccaggagcaatttctgctcctagccaagtcggccaagggggcagcgctggccacactcatccatcaggtgctggaggcccctggtgtctacgtgtttggagaactgctggacatgcccaatgttagagagctggctgagagtgactttgcctctaccttccggctgctcacagtgtttgcttatgggacatacgctgactacttagctgaagcccggaatcttcctccactaacagaggctcagaagaataagcttcgacacctctcagttgtcaccctggctgctaaagtaaagtgtatcccatatgcagtgttgctggaggctcttgccctgcgtaatgtgcggcagctggaagaccttgtgattgaggctgtgtatgctgacgtgcttcgtggctccctggaccagcgcaaccagcggctcgaggttgactacagcatcgggcgggacatccagcgccaggacctcagtgccattgcccgaaccctgcaggaatggtgtgtgggctgtgaggtcgtgctgtcaggcattgaggagcaggtgagccgtgccaaccaacacaaggagcagcagctgggcctgaagcagcagattgagagtgaggttgccaaccttaaaaaaaccattaaagttacgacggcagcagcagccgcagccacatctcaggaccctgagcaacacctgactgagctgagggaaccagctcctggcaccaaccagcgccagcccagcaagaaagcctcaaagggcaaggggctccgagggagcgccaagatttggtccaagtcgaattgaaaggactgtcgtttcctccctggggatgtggggtcccagctgcctgcctgcctcttaggagtcctcagagagccttctgtgcccctggccagctgataatcctaggttcatgacccttcacctcccctaaccccaaacatagatcacaccttctctagggaggaggcaaatgtaggtcatgtttttgttggtactttctgttttttgtgacttcatgtgttccattgctccccgctgccatgctctctcccttgtttccttaagagctcagcatctgtccctgttcattacatgtcattgagtaggtgggtagccctgatgggggtcgctctgtctggagcataacccacaggcgttttttctgccaccccatccctgcatgcctgatccccagttcctataccctacccctgacctattgagcagcctctgaagagccatagggcccccacctttactcacaccctgagaattctgggagccagtctgccatgccaggagtcactggacatgttcatcctagaatcctgtcacactacagtcatttcttttcctctctctggcccttgggtcctgggaatgctgctgcttcaaccccagagcctaagaatggcagccgtttcttaacatgttgagagatgattctttcttggccctggccatctcgggaagcttgatggcaatcctggaagggtttaatctccttttgtgagtttggtggggaagggaagggtatatagattgtattaaaaaaaaaaaggtatatatgcatatatctatatataatatgacgcagaaataaatctatgagaaatctaaaaaaaaaaaaaaaaaa

SEQ ID NO: 177 - DNA, 828 bp, Unknown
  COP9 constitutive photomorphogenic homolog subumit 7A
  exon (1)..(828)
atgagtgcggaagtgaaggtgacagggcagaaccaggagcaatttctgctcctagccaagtcggccaagggggcagcgctggccacactcatccatcaggtgctggaggcccctggtgtctacgtgtttggagaactgctggacatgcccaatgttagagagctggctgagagtgactttgcctctaccttccggctgctcacagtgtttgcttatgggacatacgctgactacttagctgaagcccggaatcttcctccactaacagaggctcagaagaataagcttcgacacctctcagttgtcaccctggctgctaaagtaaagtgtatcccatatgcagtgttgctggaggctcttgccctgcgtaatgtgcggcagctggaagaccttgtgattgaggctgtgtatgctgacgtgcttcgtggctccctggaccagcgcaaccagcggctcgaggttgactacagcatcgggcgggacatccagcgccaggacctcagtgccattgcccgaaccctgcaggaatggtgtgtgggctgtgaggtcgtgctgtcaggcattgaggagcaggtgagccgtgccaaccaacacaaggagcagcagctgggcctgaagcagcagattgagagtgaggttgccaaccttaaaaaaaccattaaagttacgacggcagcagcagccgcagccacatctcaggaccctgagcaacacctgactgagctgagggaaccagctcctggcaccaaccagcgccagcccagcaagaaagcctcaaagggcaaggggctccgagggagcgccaagatttggtccaagtcgaattga

SEQ ID NO: 178 - DNA, 1717 bp, Equus caballus
ggcacgagggaatctgcagctgccagcattaattagccttcctcttttctaacctcttgtacagactgttgtcagtcagtgcagctctctccctgattcggccatcctgggtgatgttcacgcaagaaccattttccctggggaccatcttacttctaatggggccaaagaatggaaggcaaatgtgtagacgacctttagattacagggcagtcttctcctggagcatcttctcctggccctgcccccttcccatgctgtttgaattagcccagcaggaggctgtgaccggggctagtaggcagtggcgacatggtcctctcgtgccgctcgtgccgaattcggcacgagtggaagccagcgagcgccgctgtataggaaagaagccgcagctctttccagagtccaccggggaggcagaggctctgaggacctatagaccatggtgcgcgcgccctgcctgctgctgctgctgccactgctgcgcttctctgcggccacactagagccctgtgaggtggacgatgagaacttccgctgcgtctgtaacttcacgggtcctcagcccgactggtccagcgccttccagtgcatgactgccgtcgaggtggagatccgtggcggcggccgcaacctggaacagtttctaaaaggcgcctccgccgacccgaagcagtatgctgacattgtcaaggccctgcgcctgcagcggctcacagtgggcgccgtacaggttcctgccccgcttctggtcgccctcctacgtgcgctcgggtactcccgcctcaaggaactgacgctggaggacctagaggtaaccggcacgatgcagccgccgcctctagaagccactgggcctccgctctcctccctccgtctccgcaacgtgtcgtgggcgacaggaggtgcctggctcgccgaactgcagcagtggctcaagccgggcctcaagatattgagcattgcgcaagctcactcactcgccttttcctgcgcgcagctccacagtttctcggccctccacaccctagacctgtctgacaatcctggactgggcgagcgcggactgattgcagctctctgtccgcacaagttcccggccctccgagatctagcgctccgcaacgcggggatgcagacacccaacggcgtgtgcgcggcgatggcggcggcgggtgtgcagccccatagcctggacctcagccacaactcgctgagcgccgctgctccgggcgctcccaggtgtgactggcccagcgcactgagttctctcaacttgtccttcgctgggctggagcaggtgcctaaaggactaccgggcaagcttagcgtgcttgatctcagctgcaacaggctcaacaaggcgccgcgagcagacgagctgcccgtggtgagtaatctgatactggacaggaatccctatctggaccctgaagcgtccaagcagcaagaccagaactccggcgtggtcgccgcctgtgcgcactcagccctgaccgtggggatatcaggaaccctggcgctgcttcgaggagccggggacttcgcctaagccccaggggagaagaatgaattgactcagattgccctggctccaggggagcctcattaggacgtcttaaccaaccgaccctctgccccatcttcattaaaatcttaaacaacaaaaaaaaaaaaaaaaaaaaaaaaaaaaaaaaaaaaaaaaaaaaaaaaaaaa

SEQ ID NO: 179 - DNA, 1110 bp, Unknown
  lipopolysaccharide receptor (CD14)
  exon (1)..(1110)
atggtgcgcgcgccctgcctgctgctgctgctgccactgctgcgcttctctgcggccacactagagccctgtgaggtggacgatgagaacttccgctgcgtctgtaacttcacgggtcctcagcccgactggtccagcgccttccagtgcatgactgccgtcgaggtggagatccgtggcggcggccgcaacctggaacagtttctaaaaggcgcctccgccgacccgaagcagtatgctgacattgtcaaggccctgcgcctgcagcggctcacagtgggcgccgtacaggttcctgccccgcttctggtcgccctcctacgtgcgctcgggtactcccgcctcaaggaactgacgctggaggacctagaggtaaccggcacgatgcagccgccgcctctagaagccactgggcctccgctctcctccctccgtctccgcaacgtgtcgtgggcgacaggaggtgcctggctcgccgaactgcagcagtggctcaagccgggcctcaagatattgagcattgcgcaagctcactcactcgccttttcctgcgcgcagctccacagtttctcggccctccacaccctagacctgtctgacaatcctggactgggcgagcgcggactgattgcagctctctgtccgcacaagttcccggccctccgagatctagcgctccgcaacgcggggatgcagacacccaacggcgtgtgcgcggcgatggcggcggcgggtgtgcagccccatagcctggacctcagccacaactcgctgagcgccgctgctccgggcgctcccaggtgtgactggcccagcgcactgagttctctcaacttgtccttcgctgggctggagcaggtgcctaaaggactaccgggcaagcttagcgtgcttgatctcagctgcaacaggctcaacaaggcgccgcgagcagacgagctgcccgtggtgagtaatctgatactggacaggaatccctatctggaccctgaagcgtccaagcagcaagaccagaactccggcgtggtcgccgcctgtgcgcactcagccctgaccgtggggatatcaggaaccctggcgctgcttcgaggagccggggacttcgcctaa

SEQ ID NO: 180 - DNA, 1365 bp, Unknown
  Nuclear receptor binding factor 1
gctctgtgttggttggagcgagcatgtgggtctgcagtaccctgtggcgggtgcgaacccccgcccggcagtggcgggggctgctcccagcttctggctgtcacggacctgccgcctcctcctactccgcatccgccgagcctgcccgggtccgggcgcttgtctatgggcaccacggggatccagccaaggtcgtcgaactcaagaacctggagctagctgctgtgagaggatcagatgtccgtgtgaagatgctggcggcccctatcaatccatctgacataaatatgatccaaggaaactacggactccttcctgaactgcctgctgttggagggaacgaaggtgttgcacaggtggtagcggtgggcagcaatgtgaccgggctgaagccaggagactgggtgattccagcaaatgctggtttaggaacctggcggaccgaggctgtgttcagcgaggaagcactgatccaagttccgagtgacatccctcttcagagcgctgccaccctgggtgtcaatccctgcacagcctacaggatgttgatggacttcgagcaactgcagccaggggattctgtcatccagaatgcatccaacagcggagtggggcaagcggtcatccagatcgccgcagccctgggcctaagaaccatcaatgtggtccgagacagacctgatatccagaagctgagtgacagactgaagaaaatgggggctgagcatgttatcactgaagaggaattaagaaaacatgagatgaaaaacttctttaaggatgtgccccggccgcggcttgctctcaactgcgtcggtgggaaaagctccacagagctgctgcgacatttagcgcccggaggaaccatggtgacctacggggggatggccaagcagcctgtcatagcctctgtgagcctgttcatttttaaggatgtcaaactgcggggcttttggttgtcccagtggaagaaggaccacagtccagagcagttccaggggctgatcctcacgctgtgcgatctcatccgccaaggccagctcatggcccccatctgctctgagctcccgctgcaggactaccagcgtgccttggaaactgcgatgcagcccttcgtgtcttccaagcagattctcaccatgtgatcatcccaaaagagctggagtgacatgggaggggaggcggatctgaggggctgggtgcaggcccctcagttggggctcccaccttccccagactactgttctcctcactgcctcttcctattaggaggatggtgaagccagccaaggcttttcccagggccagcctcagggtatctaataaagtctgaactctcccttccaaaaaaaaaaaaaaaaaaaa

SEQ ID NO: 181 - DNA, 1122 bp, Unknown
  Nuclear receptor binding factor 1
  exon (1)..(1122)
atgtgggtctgcagtaccctgtggcgggtgcgaacccccgcccggcagtggcgggggctgctcccagcttctggctgtcacggacctgccgcctcctcctactccgcatccgccgagcctgcccgggtccgggcgcttgtctatgggcaccacggggatccagccaaggtcgtcgaactcaagaacctggagctagctgctgtgagaggatcagatgtccgtgtgaagatgctggcggcccctatcaatccatctgacataaatatgatccaaggaaactacggactccttcctgaactgcctgctgttggagggaacgaaggtgttgcacaggtggtagcggtgggcagcaatgtgaccgggctgaagccaggagactgggtgattccagcaaatgctggtttaggaacctggcggaccgaggctgtgttcagcgaggaagcactgatccaagttccgagtgacatccctcttcagagcgctgccaccctgggtgtcaatccctgcacagcctacaggatgttgatggacttcgagcaactgcagccaggggattctgtcatccagaatgcatccaacagcggagtggggcaagcggtcatccagatcgccgcagccctgggcctaagaaccatcaatgtggtccgagacagacctgatatccagaagctgagtgacagactgaagaaaatgggggctgagcatgttatcactgaagaggaattaagaaaacatgagatgaaaaacttctttaaggatgtgccccggccgcggcttgctctcaactgcgtcggtgggaaaagctccacagagctgctgcgacatttagcgcccggaggaaccatggtgacctacggggggatggccaagcagcctgtcatagcctctgtgagcctgttcatttttaaggatgtcaaactgcggggcttttggttgtcccagtggaagaaggaccacagtccagagcagttccaggggctgatcctcacgctgtgcgatctcatccgccaaggccagctcatggcccccatctgctctgagctcccgctgcaggactaccagcgtgccttggaaactgcgatgcagcccttcgtgtcttccaagcagattctcaccatgtga

SEQ ID NO: 182 - DNA, 905 bp, Unknown
  Triggering receptor expressed on myeloid cells 1
gtcccgggagccctcagcagcagttggagctggtgcacaggaaggatgaggaagaccaggctctgggggctgctgtggatgctctttgtctcagaactccgagctgcaactaaattaactgaggaaaagtatgaactgaaagaggggcagaccctggatgtgaaatgtgactacacgctagagaagtttgccagcagccagaaagcttggcagataataagggacggagagatgcccaagaccctggcatgcacagagaggccttcaaagaattcccatccagtccaagtggggaggatcatactagaagactaccatgatcatggtttactgcgcgtccgaatggtcaaccttcaagtggaagattctggactgtatcagtgtgtgatctaccagcctcccaaggagcctcacatgctgttcgatcgcatccgcttggtggtgaccaagggtttttcagggacccctggctccaatgagaattctacccagaatgtgtataagattcctcctaccaccactaaggccttgtgcccactctataccagccccagaactgtgacccaacccccacccaagtcaactgccggtgtctcccgccctggacttgaagtcaaccccacacatgtgacagacgtcaccaggatctctgtgttcagcattgtcattcctgtggcgtgcgcactcgtgactaagagcctggtccttactgtcctgtttgctgtcacacagaagtcatttggatcctaggcccatggacccatgaggatgacctctgatctccatctacatccatctggcagttgtgccaagggaggagggaggaggtaaaaggcagggagttaataacatgaattaaatctgtaatcaccgccaaaaaaaaaaaaaaaaaaaaaaaaaaaaaa

SEQ ID NO: 183 - DNA, 705 bp, Unknown
  Triggering receptor expressed on myeloid cells 1
  exon (1)..(705)
atgaggaagaccaggctctgggggctgctgtggatgctctttgtctcagaactccgagctgcaactaaattaactgaggaaaagtatgaactgaaagaggggcagaccctggatgtgaaatgtgactacacgctagagaagtttgccagcagccagaaagcttggcagataataagggacggagagatgcccaagaccctggcatgcacagagaggccttcaaagaattcccatccagtccaagtggggaggatcatactagaagactaccatgatcatggtttactgcgcgtccgaatggtcaaccttcaagtggaagattctggactgtatcagtgtgtgatctaccagcctcccaaggagcctcacatgctgttcgatcgcatccgcttggtggtgaccaagggtttttcagggacccctggctccaatgagaattctacccagaatgtgtataagattcctcctaccaccactaaggccttgtgcccactctataccagccccagaactgtgacccaacccccacccaagtcaactgccggtgtctcccgccctggacttgaagtcaaccccacacatgtgacagacgtcaccaggatctctgtgttcagcattgtcattcctgtggcgtgcgcactcgtgactaagagcctggtccttactgtcctgtttgctgtcacacagaagtcatttggatcctag

SEQ ID NO: 184 - DNA, 629 bp, Unknown
  No homology
accgcgacttccagtacgagctggtcatccagagacagaggatcgaggtgccgggcgactcgcagaatcaatacattttcccgagtctggagcccagaccgaagcacacggtgaagatcaggacgggggacgcccgggacgcccaggacccccgctggggcgcctggagccggcccgtcgagttcggctccgaggacccggatgcgggggtcgtgcacgtgtacgtgctcgtcgtgctggggaccctgggctgcgcgctggcgctcggctgcctggtgaagaggttcctccggagacacagtctgttccagccggtcccgcgcatcaaagacaaactgaacgataaccatccgaccgacctccaggacgtctgggaggaattcccggcgggggccggaaaagccgagcacgaagaggtggtgaccgtccaggaggtcgacagagccccggtcagcgggtgaaaggtcacgggcacctccggcccccagacaccccggaagccgcccgggttttctcaaaaccgttttaagcgtttctgcagctatttttctactttttattaaaaaaataaatgtgaagtttggccaagaggcttcccgacggggggccggaaaaaaggcccaaagctt

SEQ ID NO: 185 - DNA, 640 bp, Unknown
  No homology
agtcctctcgatgaagcttcttcccacctagaaagaagtcctctctgagactcaagggctaaggcaaggtcttccagaaaacaaggctttgactccaagaacagaggtgatggggagacttcttggctcggcggggaaaggaggacgccaatgggtcaaactaactctgaatccctccctccatctctctttttccactgtcgtcagagccaacaagaaatgacagcctccaagccttcctaaaagcacacttgcccccgcctgccacctctcctcaggctgctgccctcccaggcgctccacagcgaaggggtgtggtgtttcctgcaggccaggccagctgcctcagccccgccaaaactgtgttcccagccagcgctctggagcagggatgacgtgtggccagcccttctcaggtctcagctctgctgggatgggaggagaggccagggagaaaggttaggggcccaggggtgggtgacaacgctggctgctgaaagcccatgagctgcttctttgttctctgtcacgggacaaaaatctctcatcctattctgctttcagttcattaagagagcacattttactcatacacaaataaaagttttcccttgtggaaacaacagctttaaaagaaagg

SEQ ID NO: 186 - DNA, 416 bp, Unknown
  No homology
agggcgtcacgctgaccgtgatggtcaacaccagccaaacgcaggtttcggagaagctcgtctacaccaacccaggtggtgagggcaccgccgcccagaacttctcatgcttcatctacatcgtgcacttcatgatctgcacttgggccccgggccgcgcggcccccgacgacgtccagtatttcctgtatatacgagactccaagaagcgggagagggaatgtccccgttacatgagcgactcggggacccacgtgggctgccacctagacgacctctcgggattgacctcttacaattacttcgtggtgaacgggaccagccaaacgacggggatccagttcttcgattccgttatgcggtccaagcaaatagagaggtacagcccgcccgccaacatcagcgtgcaggtaaac

SEQ ID NO: 187 - DNA, 571 bp, Unknown
  No homology
tcctcatcagagtcacccaaggaacttatgcagatgccatgtcctcactccgaatcctcactctgggagtggagccaggtgtctgcatttgaacagggtgagggggtgggttgcctgctggacaagggagctgagccagcagctccggactctgtcctgtggcttttgtgtgtctctcccatgttctccctcccaggggcccaccacttcatgttctctacagagctaagatgatggccttgcttgagagaggtccatcccccgtggttggggtcacttagcagcgacttcttggactgccatccagccacagtggccccacagagctgtccagagccgaggctgtgggctgcagtcccagtgagcagggacgttgcccgctgttggtcatgacaaccaaacgagtccgagggcacagccaggtgtcttccaccagcccatgagctgagaatgctaagtcaccagacaaccagaaattgagtctctgtcaggatccttttgaagtgtaaggagagagaaacttacactttgaaaggttttgagcctcatccaggacaataaaaataactgt

SEQ ID NO: 188 - DNA, 6028 bp, Human papillomavirus type E6
ggtgtggacgttgtctaaatttcggtagccatggcacaagaatataagaaagcatgggattatggcaaccacagaatctcagtagtacaagttccattcagttttttctgaaagaaagccctctgttaaagtgaagcaaagaaactgttgtggattataacgtttagaagttccaatttttcagtgctttacaaataaagcatcatttaaccttttaaatgaaaaagattaagatctcatgcaactgttgtattttctggaagccattctccaaaagggaagtgcacatttaaaacacagatatgatggtccttgctgcagggatttaagtctacttgcttttacatcatgaccagcttgaaacggtcacagacagaaaggcctcttgccactgacagggcctctgttgttggcacagacggcacccccaaagtccacactgatgatttctacatgcggcgcttccggtcccaaaatggcagcttaggatcatcagttatggctcctgtaggacccccccgaagtgaaggttctcaccatataacctcaacccccggagtcccaaaaatgggggtaagggcaaggattgcagattggcccccaagaaaggaaaacataaaagaatctagccgttcaagccaggaaatagaaacctcaagttgccttgatagcctgtcctccaaaagcagtcctgtgagtcagggaagttctgttagcctcaattccaatgactcagccatgctgaaaagcatacagaacacgctgaaaaacaagacaagaccgtcggagaacatggactccagatttctcatgcctgaagcctaccccagctcccccagaaaagctcttcgcagaatacgccagcgaagcaacagtgatatcaccataagtgaacttgatgtggatagctttgatgaatgtatctcacctacatacaagactggaccatcactgcacagggaatatggtagcacatcttcaattgataaacagggaacatctggagaaagcttttttgatttgttaaagggctacaaagatgacaaatctgatcgaggtccaactccaaccaagctcagtgactttctcattactggtggtggcaagggttctggtttctctttggatgtaatagacgggcctatctcacagagagagaacctcaggctttttaaggaaagggaaaaaccactcaagcgacgttcaaaatctgaaactggagactcctctatttttcgtaaattgcgcaatgccaaaggtgaagaacttgggaagtcatcagatcttgaagataaccgatcagaagactctgtcaggccctggacatgtccaaagtgctttgcccactatgatgtccagagtatattatttgatttgaatgaggcaattatgaacaggcacaatgttattaagaggagaaacaccaccactggagcttccgcagctgccgtggcatccttggtctctggacctctgtctcattcagccagttttagctccccaatgggcagcacagaggacctgaattccaaaggaagcctcagcatggaccagggagatgataaaagcaatgagcttgtaatgagctgtccatattttcggaatgagataggtggagaaggggagaggaaaatcagcctttcaaaatcaaattctggctcctttagtggatgtgaaagtgcctcctttgagtctacccttagttcccattgcacaaatgcaggagtggcagtacttgaagtgcccaaggagaacttggtgttgcacctagatagagtgaaaagatacatcgtggaacacgtagatctgggtgcatactattatagaaaatttttctaccagaaggaacactggaactattttggggctgatgagaatcttggtccagtggctgtgagcattcgaagggaaaaaccagatgaaatgaaagaaaatggatctccgtacaactaccgaataatttttagaactagtgagctcatgacactgagaggttcggtcctggaggacgccattccgtcgacagccaagcactcgacagccagaggcctgcctctcaaagaagtgctggagcacgtggttcctgagctcaatgtccagtgcctgcggttggccttcaacacacccaaggtcacagagcagctcatgaaactggatgaacaagggctgaactaccagcagaaagtaggcatcatgtactgcaaagctggacagagcactgaagaagagatgtacaacaatgagtcagctggcccagcctttgaagaattccttcaactattgggagagcgagttcggctcaaaggatttgagaagtatcgagcacagcttgataccaaaactgactccactggaacccattctctgtacacaacatacaaagattatgaaattatgttccatgtttctaccatgctgccatacacacccaacaacaaacaacagctcctgaggaagcggcacattggaaatgatatcgtaacaattgttttccaagagcctggagcacagccattcagcccaaaaaacatccgatcccacttccagcacgttttcgtcatcgtcagggtgcacaatccgtgctctgacagtgtctgttatagtgtggctgttaccaggtccagagatgtgccttcctttgggcctcccattcctaaaggggtcactttccctaagtcaaatgtgttcagggacttccttttggcgaaagtgattaatgcagaaaatgctgctcataaatcggagaagtttcgggccatggcaactcggacccgccaggaatacctgaaagatctggcagaaaagaatgtcaccaacacccctatcgacccttctggcaagtttccgttcatctctctggcttccaagaagaaggaaaagtctaagccatatccaggagccgagctcagcagcatgggggccattgtatgggcagtccgggctgaagactacaacaaggccatggaactagactgccttttagggatctccaatgagttcattgtgctcattgaacaggaaacaaagagcgtggtcttcaattgttcctgtagagatgtgatagggtggacttcaactgacaccagcctcaaaatcttctatgaacgaggagaatgtgtttcagtgggtagttttattaacattgaggagatcaaagagattgtcaaaaggttgcagtttgtttcaaaaggctgtgaatcggtggagatgactctgcgaagaaatgggctaggacagcttggcttccatgtcaactatgagggcattgtggcggatgtggagccctacggttatgcctggcaggcagggctgaggcagggcagtcgcctggtggagatctgcaaggtggcggtagccactctgagccatgagcagatgatcgacctcctgagaacatctgtcacggtgaaggttgtcatcattcccccgcatgatgactgcaccccgcggaggagttgctctgaaacctaccgcatgccagtgatggagtacaaaatgaatgaaggtgtttcatacgaattcaagtttcccttccgaaataataacaagtggcagaggaacgccagcaaggggcctcattcacctcaagtcccgtcccaggtgcagagtcccatgacctcgcggctgaatgctggaaaaggagatgggaagatgcctcctccagaaagagccgccaacatccctcgaagcatctccagtgacgggcgcccactagagaggcggctgtctcctggttcggacatctatgtgacggtctcatccatggctttagcaagatcccagtgtcggaactctcctagcaacttgtcttcatccagtgatactggttctgtggggggcacttacaggcagaagtccatgcccgaagggtttggagtgagccgtagatccccagcctccattgacaggcagaacacccagtcagatattggtggcagcggaaaatccacgcctagctggcaaagaagtgaggatagcattgctgaccagatggcttacagttatagaggacctcaggatttcaattcttttgtcctcgagcagcatgaatatacagagccaacatgccatctcccagcagtatcaaaggtactgccagctttccgagagagccccagtgggagattaatgcggcaggatccagtggttcatttgtctccaaacaaacaagggcattctgatagccactactcgagccactccagtagcaatactctctccagcaatgcgtcaagtgcccatagtgatgagaagtggtacgatggggaccgcacagaatccgaactcaacagctataactatctgcaaggcacctctgctgacagtggcattgacaccacctcttatggccccagccacggcagcacagcctcgctgggggctgccacatcgtcacctcgctcagggccaggcaaggagaaagtggcacccctatggcacagctccagtgaagtaatctccatggcagatcggactttggagacagagagccacggcctggaccggaaaacagagtcttccctgagcttagacatacacagcaagagccaagccggctcgacccctctgacaagggagaacagcaccttcagtataaacgatgctgcttcccacacaagtaccatgagctcccgacactctgccagcccagtggttttcaccagtgcccggagttcacctaaagaagagcttcatccagctgccccctcacagctcgcaccatccttctcctcctcttcctcctcctcctctggtcctaggagtttttaccctcgccagggcgctactagcaagtacctgattggatggaaaaaacccgaaggaaccataaactccgtgggatttatggacacgagaaagcgtcatcagagcgatggcaatgaaatagcccacaccaggctgcgtgcctcaaccagagacctccgggcatctcctaagccaacctccaagtccaccattgaagaagatctaaagaaactaattgatcttgaaagcccaactcctgaatcacagaagagttttaagttccacgcactctcctctcctcagtctcctttccccagcacccccacctcacggcgggccttgcacagaacactgtcggacgagagcatttacaatagccagagggagcactttttcacctccagggcgtcacttctggaccaagccctgcccaacgacgtcctcttcagtagcacgtacccttctctccccaagtcgctcccgttgaggaggccttcttacaccttaggaatgaaatcgctgcatggagagttctcagcctcggacagctccctcactgacatccaggagacccgcaggcagcctatgcccgaccctggcctgatgcccctgcctgacactgctgcagacttggattggtccaacctggtagatgctgccaaagcctatgaggtccagagagcctcattttttgctgctagtgatgaaaaccatcgccccttgagtgctgcatccaacagtgatcagctggaggaccaggctctggcccagatgaagccttacagcagcagtaaagactcctctcccactctggcttctaaagtggaccagctggaaggtatgctgaagatgcttcgggaagatttgaagaaggaaaaagaagacaaagctcaccttcaggcggaggtgcagcacctgcgagaggacaacctgaggctacaggaggagtcccagaacgcctcggacaagctgaagaagttcacagaatgggtcttcaacaccatagacatgagctagggaaggctgaggaggacaggagaagggcccagacactccctccagtgagtgtcctgcagcccttattccctccatagaaagcatcctcagagcaccttccctggcttcctactctgccccctttcggggagtgcacaacacaatagttgcagatcaacaatcatcacctgccttttgtagaaaagaaaaacaaaaaaagtaaataaaaattttaaacagtaaaataaaagtttaactgctaaaaaaaaaaaaaaaaaaaaaaaaa

SEQ ID NO: 189 - DNA, 5415 bp, Homo sapiens
  exon (1)..(5415)
atgaccagcttgaaacggtcacagacagaaaggcctcttgccactgacagggcctctgttgttggcacagacggcacccccaaagtccacactgatgatttctacatgcggcgcttccggtcccaaaatggcagcttaggatcatcagttatggctcctgtaggacccccccgaagtgaaggttctcaccatataacctcaacccccggagtcccaaaaatgggggtaagggcaaggattgcagattggcccccaagaaaggaaaacataaaagaatctagccgttcaagccaggaaatagaaacctcaagttgccttgatagcctgtcctccaaaagcagtcctgtgagtcagggaagttctgttagcctcaattccaatgactcagccatgctgaaaagcatacagaacacgctgaaaaacaagacaagaccgtcggagaacatggactccagatttctcatgcctgaagcctaccccagctcccccagaaaagctcttcgcagaatacgccagcgaagcaacagtgatatcaccataagtgaacttgatgtggatagctttgatgaatgtatctcacctacatacaagactggaccatcactgcacagggaatatggtagcacatcttcaattgataaacagggaacatctggagaaagcttttttgatttgttaaagggctacaaagatgacaaatctgatcgaggtccaactccaaccaagctcagtgactttctcattactggtggtggcaagggttctggtttctctttggatgtaatagacgggcctatctcacagagagagaacctcaggctttttaaggaaagggaaaaaccactcaagcgacgttcaaaatctgaaactggagactcctctatttttcgtaaattgcgcaatgccaaaggtgaagaacttgggaagtcatcagatcttgaagataaccgatcagaagactctgtcaggccctggacatgtccaaagtgctttgcccactatgatgtccagagtatattatttgatttgaatgaggcaattatgaacaggcacaatgttattaagaggagaaacaccaccactggagcttccgcagctgccgtggcatccttggtctctggacctctgtctcattcagccagttttagctccccaatgggcagcacagaggacctgaattccaaaggaagcctcagcatggaccagggagatgataaaagcaatgagcttgtaatgagctgtccatattttcggaatgagataggtggagaaggggagaggaaaatcagcctttcaaaatcaaattctggctcctttagtggatgtgaaagtgcctcctttgagtctacccttagttcccattgcacaaatgcaggagtggcagtacttgaagtgcccaaggagaacttggtgttgcacctagatagagtgaaaagatacatcgtggaacacgtagatctgggtgcatactattatagaaaatttttctaccagaaggaacactggaactattttggggctgatgagaatcttggtccagtggctgtgagcattcgaagggaaaaaccagatgaaatgaaagaaaatggatctccgtacaactaccgaataatttttagaactagtgagctcatgacactgagaggttcggtcctggaggacgccattccgtcgacagccaagcactcgacagccagaggcctgcctctcaaagaagtgctggagcacgtggttcctgagctcaatgtccagtgcctgcggttggccttcaacacacccaaggtcacagagcagctcatgaaactggatgaacaagggctgaactaccagcagaaagtaggcatcatgtactgcaaagctggacagagcactgaagaagagatgtacaacaatgagtcagctggcccagcctttgaagaattccttcaactattgggagagcgagttcggctcaaaggatttgagaagtatcgagcacagcttgataccaaaactgactccactggaacccattctctgtacacaacatacaaagattatgaaattatgttccatgtttctaccatgctgccatacacacccaacaacaaacaacagctcctgaggaagcggcacattggaaatgatatcgtaacaattgttttccaagagcctggagcacagccattcagcccaaaaaacatccgatcccacttccagcacgttttcgtcatcgtcagggtgcacaatccgtgctctgacagtgtctgttatagtgtggctgttaccaggtccagagatgtgccttcctttgggcctcccattcctaaaggggtcactttccctaagtcaaatgtgttcagggacttccttttggcgaaagtgattaatgcagaaaatgctgctcataaatcggagaagtttcgggccatggcaactcggacccgccaggaatacctgaaagatctggcagaaaagaatgtcaccaacacccctatcgacccttctggcaagtttccgttcatctctctggcttccaagaagaaggaaaagtctaagccatatccaggagccgagctcagcagcatgggggccattgtatgggcagtccgggctgaagactacaacaaggccatggaactagactgccttttagggatctccaatgagttcattgtgctcattgaacaggaaacaaagagcgtggtcttcaattgttcctgtagagatgtgatagggtggacttcaactgacaccagcctcaaaatcttctatgaacgaggagaatgtgtttcagtgggtagttttattaacattgaggagatcaaagagattgtcaaaaggttgcagtttgtttcaaaaggctgtgaatcggtggagatgactctgcgaagaaatgggctaggacagcttggcttccatgtcaactatgagggcattgtggcggatgtggagccctacggttatgcctggcaggcagggctgaggcagggcagtcgcctggtggagatctgcaaggtggcggtagccactctgagccatgagcagatgatcgacctcctgagaacatctgtcacggtgaaggttgtcatcattcccccgcatgatgactgcaccccgcggaggagttgctctgaaacctaccgcatgccagtgatggagtacaaaatgaatgaaggtgtttcatacgaattcaagtttcccttccgaaataataacaagtggcagaggaacgccagcaaggggcctcattcacctcaagtcccgtcccaggtgcagagtcccatgacctcgcggctgaatgctggaaaaggagatgggaagatgcctcctccagaaagagccgccaacatccctcgaagcatctccagtgacgggcgcccactagagaggcggctgtctcctggttcggacatctatgtgacggtctcatccatggctttagcaagatcccagtgtcggaactctcctagcaacttgtcttcatccagtgatactggttctgtggggggcacttacaggcagaagtccatgcccgaagggtttggagtgagccgtagatccccagcctccattgacaggcagaacacccagtcagatattggtggcagcggaaaatccacgcctagctggcaaagaagtgaggatagcattgctgaccagatggcttacagttatagaggacctcaggatttcaattcttttgtcctcgagcagcatgaatatacagagccaacatgccatctcccagcagtatcaaaggtactgccagctttccgagagagccccagtgggagattaatgcggcaggatccagtggttcatttgtctccaaacaaacaagggcattctgatagccactactcgagccactccagtagcaatactctctccagcaatgcgtcaagtgcccatagtgatgagaagtggtacgatggggaccgcacagaatccgaactcaacagctataactatctgcaaggcacctctgctgacagtggcattgacaccacctcttatggccccagccacggcagcacagcctcgctgggggctgccacatcgtcacctcgctcagggccaggcaaggagaaagtggcacccctatggcacagctccagtgaagtaatctccatggcagatcggactttggagacagagagccacggcctggaccggaaaacagagtcttccctgagcttagacatacacagcaagagccaagccggctcgacccctctgacaagggagaacagcaccttcagtataaacgatgctgcttcccacacaagtaccatgagctcccgacactctgccagcccagtggttttcaccagtgcccggagttcacctaaagaagagcttcatccagctgccccctcacagctcgcaccatccttctcctcctcttcctcctcctcctctggtcctaggagtttttaccctcgccagggcgctactagcaagtacctgattggatggaaaaaacccgaaggaaccataaactccgtgggatttatggacacgagaaagcgtcatcagagcgatggcaatgaaatagcccacaccaggctgcgtgcctcaaccagagacctccgggcatctcctaagccaacctccaagtccaccattgaagaagatctaaagaaactaattgatcttgaaagcccaactcctgaatcacagaagagttttaagttccacgcactctcctctcctcagtctcctttccccagcacccccacctcacggcgggccttgcacagaacactgtcggacgagagcatttacaatagccagagggagcactttttcacctccagggcgtcacttctggaccaagccctgcccaacgacgtcctcttcagtagcacgtacccttctctccccaagtcgctcccgttgaggaggccttcttacaccttaggaatgaaatcgctgcatggagagttctcagcctcggacagctccctcactgacatccaggagacccgcaggcagcctatgcccgaccctggcctgatgcccctgcctgacactgctgcagacttggattggtccaacctggtagatgctgccaaagcctatgaggtccagagagcctcattttttgctgctagtgatgaaaaccatcgccccttgagtgctgcatccaacagtgatcagctggaggaccaggctctggcccagatgaagccttacagcagcagtaaagactcctctcccactctggcttctaaagtggaccagctggaaggtatgctgaagatgcttcgggaagatttgaagaaggaaaaagaagacaaagctcaccttcaggcggaggtgcagcacctgcgagaggacaacctgaggctacaggaggagtcccagaacgcctcggacaagctgaagaagttcacagaatgggtcttcaacaccatagacatgagctag

SEQ ID NO: 190 - DNA, 1515 bp, Unknown
  Fibroblast mRNA for aldolase A
ggggaaccacactccgtccacggactctccgttattttaggaggtccctggccaaagatttatttctcttgacaaccaagggcctccgtctggatttccaaggaagaatttcctctgaagcaccggaacttgctactaccagcaccatgccctaccaatatccagcactgaccccggagcagaagaaggagctgtctgacatcgctcaccgcatcgtggcacctggcaagggcatcctggctgcagatgagtccactgggagcattgccaagcggctgcagtccattggcaccgagaacaccgaggagaaccggcgcttctaccgccagctgctgctgacagctgacgaccgcgtgaacccctgcattgggggtgtcatcctcttccatgagacactctaccagaaggcggatgatgggcgtcccttcccccaagttatcaaatccaagggcggtgttgtgggcatcaaggtagacaagggcgtggtccccctggcagggacaaatggcgagactaccacccaagggttggatgggctgtctgagcgctgtgcccagtacaagaaggacggagctgactttgccaagtggcgctgtgtgctgaagattggggagcacactccctcatcccttgccatcatggaaaatgccaatgttctggcccgttatgccagcatctgccagcagaatggcattgtgcccatcgtggagcctgagatcctccctgatggggaccatgacttgaagcgctgtcagtatgtaaccgagaaggtgctggctgctgtttacaaggctctgagtgaccaccacatctacctggaaggcaccttgctgaagcccaatatggtaaccccaggccacgcctgcacccacaaatattctcatgaggagattgccatggcaactgtcacggcactgcgtcgcacggtgccccctgctgtcactgggatcaccttcctatctggaggccagagtgaggaggaggcatccatcaacctcaacgccatcaacaagtgccccctgctgaagccgtgggccctgaccttctcctatggccgagccctgcaggcctctgccctgaaggcctggggtgggaagaaggagaacctgaaggctgcccaggaggaatatgtcaagcgagccctggccaacagcctcgcctgccaaggaaaatacaccccaagtggtcacgctggggctgcagccagcgagtccctcttcatctctaaccatgcctactaagtggaggtattctaaggctgccccctcaacactccaggccctgcctcctcccactctcactcttgaagagggggcctcatccagggctttaggctgttctttcccattctccttgcctccctggtgacattggtctgtggtattgtctgtgtatgctaactccatcaccctttcgagcccactgccaaataaacagctatttaagggggaaaaaaaaaaaaaaaaaaaaaaaaaaaaaaaaaataaaaaaaaaaaaaaaaaaaaaaaaaaaaaa

SEQ ID NO: 191 - DNA, 1095 bp, Unknown
  Fibroblast mRNA for adolase A
  exon (1)..(1095)
atgccctaccaatatccagcactgaccccggagcagaagaaggagctgtctgacatcgctcaccgcatcgtggcacctggcaagggcatcctggctgcagatgagtccactgggagcattgccaagcggctgcagtccattggcaccgagaacaccgaggagaaccggcgcttctaccgccagctgctgctgacagctgacgaccgcgtgaacccctgcattgggggtgtcatcctcttccatgagacactctaccagaaggcggatgatgggcgtcccttcccccaagttatcaaatccaagggcggtgttgtgggcatcaaggtagacaagggcgtggtccccctggcagggacaaatggcgagactaccacccaagggttggatgggctgtctgagcgctgtgcccagtacaagaaggacggagctgactttgccaagtggcgctgtgtgctgaagattggggagcacactccctcatcccttgccatcatggaaaatgccaatgttctggcccgttatgccagcatctgccagcagaatggcattgtgcccatcgtggagcctgagatcctccctgatggggaccatgacttgaagcgctgtcagtatgtaaccgagaaggtgctggctgctgtttacaaggctctgagtgaccaccacatctacctggaaggcaccttgctgaagcccaatatggtaaccccaggccacgcctgcacccacaaatattctcatgaggagattgccatggcaactgtcacggcactgcgtcgcacggtgccccctgctgtcactgggatcaccttcctatctggaggccagagtgaggaggaggcatccatcaacctcaacgccatcaacaagtgccccctgctgaagccgtgggccctgaccttctcctatggccgagccctgcaggcctctgccctgaaggcctggggtgggaagaaggagaacctgaaggctgcccaggaggaatatgtcaagcgagccctggccaacagcctcgcctgccaaggaaaatacaccccaagtggtcacgctggggctgcagccagcgagtccctcttcatctctaaccatgcctactaa

SEQ ID NO: 192 - DNA, 1414 bp, Unknown
  Tumor necrosis factor-inducible mRNA fragment, adhesion receptor CD44 putative CDS
gaattcgcactgctctgagaatttgtgagcagcccctaacaggctgttacttcactacaactgacgatatgatcatcttaatttacttatttctcttgctatgggaagacactcaaggatggggattcaaggatggaatttttcataactccatatggcttgaacgagcagccggtgtgtaccacagagaagcacggtctggcaaatacaagctcacctacgcagaagctaaggcggtgtgtgaatttgaaggcggccatctcgcaacttacaagcagctagaggcagccagaaaaattggatttcatgtctgtgctgctggatggatggctaagggcagagttggataccccattgtgaagccagggcccaactgatgatttggaaaaactggcattattgattatggaatccgtctcaataggagtgaaagatgggatgcctactgctacaacccacatgcaaaggaatgcggtggcatctttacagatacaaagagaatttttaaatctccaggcttcccaaatgaatatgatgataaccaagtctgctactggcacatcagactcaagtatggtcagcgtattcacctgagttttctggactttgatcttgaagacgatacaggttgcttggctgactatgttgaaatatatgacagttatgatgatgtccatggctttgtgggaagatactgtggagatgagcttccagaagacatcatttgcacaggaaatgtcatgactttgaagtttctaagcgatgcttcggtgaccgcaggaggtttccaaatcaagtacgtggcagtggatcccccatccaaacccagtcaaggaaaaaatacaagcactacttctacgggaaataaaagctttttagctggaagatttacccatttataaaaaaaaaaaaggatgatcaaaacacacagtgtttatggttgtctcttttggaacccctttgatctcactgttattattaacatttatttattatttttctaaatgtgaaagaaatacataatttagggaaaattggaaaatataggaaactttaaacgagaaaatgaaacctctcataatcccactgcatagaaataacaagcgttaacattttcatatttttttctttcagtcatttttgtatttgtggtatatgtatatatgtacctatatgtatttgcatttgaaattttggaatcctgctctatgtacagttttgtattatactttttaaatcttgaactttatgaacattttctgaaatcattgattattctacaaaaacatgattttaaacagctgtaaaatattctatgatatgaatgttttatgcattatttaagcctgtctctattgttggaatttcaggtcattttcataaatattgttgcaataaatatccttcggaattc

SEQ ID NO: 193 - DNA, 834 bp, Unknown
  Tumor necrosis factor-inducible (TSG-6)
  exon (1)..(834)
atgatcatcttaatttacttatttctcttgctatgggaagacactcaaggatggggattcaaggatggaatttttcataactccatatggcttgaacgagcagccggtgtgtaccacagagaagcacggtctggcaaatacaagctcacctacgcagaagctaaggcggtgtgtgaatttgaaggcggccatctcgcaacttacaagcagctagaggcagccagaaaaattggatttcatgtctgtgctgctggatggatggctaagggcagagttggataccccattgtgaagccagggcccaactgatgatttggaaaaactggcattattgattatggaatccgtctcaataggagtgaaagatgggatgcctattgctacaacccacacgcaaaggagtgtggtggcgtctttacagatccaaagcgaatttttaaatctccaggcttcccaaatgagtacgaagataaccaaatctgctactggcacattagactcaagtatggtcagcgtattcacctgagttttttagattttgaccttgaagatgacccaggttgcttggctgattatgttgaaatatatgacagttacgatgatgtccatggctttgtgggaagatactgtggagatgagcttccagatgacatcatcagtacaggaaatgtcatgaccttgaagtttctaagtgatgcttcagtgacagctggaggtttccaaatcaaatatgttgcaatggatcctgtatccaaatccagtcaaggaaaaaatacaagtactacttctactggaaataaaaactttttagctggaagatttagccacttataa

SEQ ID NO: 194 - DNA, 444 bp, Unknown
  No homology
ttcggcacgagctcgtgccgttcgcgtgcacccagggaggactcggagtcccccgccctgactcccattttcttctggtcgccgtggtcacccacaggaagggggcattcaggaggagtgctgggccccggaggccatgtcctgccgctcccctatttggggcagcctgggttttctcgggcggctccccaggtctcagcctgtgaggactgcggcgagtctggagaccccagggctgcccccttcttcgggactgtgtggacccacgagggccatctgctgacagagcaaccccctcctgccccctcttgccttcccccgcagccacgtttcgggggtgggctctgtctggttcacagagccaccccactgcccggcccatcctccgatgcagcgcagacacccaataaatattgatggttgactgaaaaaaaaaaaaaaaaa

SEQ ID NO: 195 - DNA, 410 bp, Unknown
  No homology
ttcggcacgagctcgtgccgttcgcgtgcacccagggaggactcggagtcccccgccctgactcccattttcttctggtcgccgtggtcacccacaggaagggggcattcaggaggagtgctgggccccggaggccatgtcctgccgctcccctatttggggcagcctgggttttctcgggcggctccccaggtctcagcctgtgaggactgcggcgagtctggagaccccagggctgcccccttcttcgggactgtgtggacccacgagggccatctgctgacagagcaaccccctcctgccccctcttgccttcccccgcagccacgtttcggggtgggctctgtctggttcacagagccaccccactgcccggcccatcctccgatgcagcgcagacacccaataaa

SEQ ID NO: 196 - DNA, 3813 bp, Unknown
  Formin homology 2 domain containing 1
agaagctgcactggggccgggactcggaggcgcgctgcgtgagccggccgcagagccatggcgggcggggaagaccgcggggacggagagccggtatcagtggtgaccgtgagggtgcagtacctggaagacaccgaccccttcgcatgtgccaactttccggagccgcgccgggcccccacctgcagcctggacggggcgctgcccttgggcgcgcagatacccgcggtgcaccgcctgctgggagcgccgctcaagttggaggattgtgctctgcaagtgtctccctccggatactacctggacaccgagctgtccctggaagagcagcgggagatgctggagggcttctatgaagagatcagcaaagggcggaagcccacgctgatccttcggacccagctctctgtgagggtcaacgctatcttggaaaagctgtatagctccagtggtcctgagctccgccgctccctcttctcactgaagcagatcttccaggaggacaaagacctggtgcctgaatttgtgcattcagaggggctgagctgcctgatccgtgtgggtgctgctgccgaccacaactaccagagctacatccttagagcgctcggccagctgatgctctttgtggatggaatgctgggggtggtggcccacagtgacactattcagtggctgtacacattgtgtgccagcctgtcccgcttggtggtgaagacagccctgaagctgctgttggtgtttgtagaatactccgaaaacaacgcaccgctgttcatccgtgcagtgaactctgtggccagcaccaccggtgctcctccctgggccaatctggtgtccatcctggaggagaagaatggcgctgaccctgagttgttggtgtacacggtcaccctcatcaacaagacgctggcggcgctcccggaccaggactccttctacgatgtgacggatgcactggagcagcagggcatggaagcgctggtccagcgccacctgggcactgcgggcactgacgtcgacctgcgcacgcagcttgtgctctacgagaacgccctgaaattggaggatggagacatcgaagaagccccaggcgctggtgggcggcgggaacgacgaaagccttcttctgaggagggcaagaggagccgccgttctctggaaggcgggggctgccccgcgcgtgccccggaacctggccccacaggccccgcctcaccggtaggccccacctcttccaccggccccgccctgctgacaggccccgcctccagccctgtgggccctccctccggtctccaagcttcagtgaacctttttcctaccatctctgtggcaccctcagctgacacctccagcgagaggagcatctacaaagcccggttcctggagaatgtggcggcagcagaaacagagaagcaggttgcgctggcccagggccgggcagagacacttgccggggccatgcccaatgaggcgggtggacacccagatgcccggcaactctgggactccccagagacagcccctgcagccagaacaccccagagccctgccccctgtgtcctgctccgggcccagcgaagccttgcaccagagcccaaggagccactgataccagcaagccccaaggctgagcccatctgggagctccctacccgtgcacccaggctctctattggggacctggacttttcagatctaggggaggatgaagaccaggacatgctgaatgtagagtctgtggaggctgggaaagacatcccagctccctcacccccactgcccctgctctcgggagtacccccccctcccccacttccacctcccccacccatcaaaggccccttcccaccacctccacctctacctctggctgcccctcttccccattcagtgcctgacagctcagccctccccactaagaggaagacagtaaaacttttctggcgtgagctgaagctggctgggggccatggagtctctgcaagccgctttgggccctgcgccaccctctgggcttcactggaccctgtctcagtggacacggcccgactggaacacctctttgagtctcgtgccaaagaggtgctgccctccaagaaagctggagagggccgccggacaatgaccacagtgctggaccccaagcgcagcaacgccatcaacatcggcctaaccacactgccacctgtgcatgtcattaaggctgctctgctcaactttgatgagtttgctgtcagcaaggatggcattgagaagctactgaccatgatgcccacggaggaagagcggcagaagattgaggaagcccagctggccaaccctgacatacccctgggcccagccgagaacttcctgatgactcttgcctccattggcggcctcgctgctcgtctacaactctgggccttcaagctggactatgacagcatggagcgggaaattgctgagccactgtttgacctgaaagtgggtatggaacagctggtacagaatgccaccttccgctgcatcctggctaccctcctagctgtgggcaacttcctcaatggctcccagagcagcggctttgagctgagctacctggagaaggtgtcagaggtgaaggacacggtgcgtcgacagtcactgctacaccatctctgctccctagtgctccagacccggcctgagtcctctgacctctattcagaaatccctgccctgacccgctgtgccaaggtggactttgaacagctgactgagaacctggggcagctggagcgccggagccgggcagccgaggagagcctgcggagcttggccaagcatgagctggccccagccctgcgtgcccgcctcacccacttcctggaccagtgtgcccgccgtgttgccatgctaaggatagtgcaccgccgtgtctgcaataggttccatgccttcctgctctacctgggctacaccccgcaggcggcccgtgaagtgcgcatcatgcagttctgccacacgctgcgggaatttgcgcttgagtatcggacttgccgggaacgagtgctacagcagcagcagaagcaggccacataccgtgagcgcaacaagacccggggacgcatgatcaccgagacagagaagttctcaggtgtggctggggaagcccccagcaacccctctgtcccagtagcagtgagcagcgggccaggccggggtgatgctgacagtcatgccagcatgaagattctgctcaccagcaagcctgaggacaccacacatggtcgccgcagcagaggcatggtccagaacagctccccagtcgtgcccacagcagtggggccctccactgtacccccagaagaatccccaggctccagtttacccagtgacacttcagatgagatcatggacctgctagtgcagtcagtgaccaagagcagtcctcgcgccttagctgctcgagaacgcaagcgttcccgtggcaaccgcaagtctttgaggcggacattgaagagcgggctcggagaggacctggtgcaggcactgggactgagcaagggttctgacctggaggtgtgaaggcgctgcctccaggacatctatatgggccccggtatgcagtgcaagagactgtagagtgaggagggaccagagcagaattctggccccagaactctgtgcccaggagccatgccttgagcagtattagccgtgtgtgtatgcatgtgagtgtgtgtgtatgtgtgtgtgtgcatgcatatgcatgtgcatgtgtgtgagctccttgaacgcacggagcaaaataaaattttcttagctaaaaaaaaaaaaaaaaaa

SEQ ID NO: 197 - DNA, 3498 bp, Unknown
  Formin homology 2 domain containing 1
  exon (1)..(3498)
atggcgggcggggaagaccgcggggacggagagccggtatcagtggtgaccgtgagggtgcagtacctggaagacaccgaccccttcgcatgtgccaactttccggagccgcgccgggcccccacctgcagcctggacggggcgctgcccttgggcgcgcagatacccgcggtgcaccgcctgctgggagcgccgctcaagttggaggattgtgctctgcaagtgtctccctccggatactacctggacaccgagctgtccctggaagagcagcgggagatgctggagggcttctatgaagagatcagcaaagggcggaagcccacgctgatccttcggacccagctctctgtgagggtcaacgctatcttggaaaagctgtatagctccagtggtcctgagctccgccgctccctcttctcactgaagcagatcttccaggaggacaaagacctggtgcctgaatttgtgcattcagaggggctgagctgcctgatccgtgtgggtgctgctgccgaccacaactaccagagctacatccttagagcgctcggccagctgatgctctttgtggatggaatgctgggggtggtggcccacagtgacactattcagtggctgtacacattgtgtgccagcctgtcccgcttggtggtgaagacagccctgaagctgctgttggtgtttgtagaatactccgaaaacaacgcaccgctgttcatccgtgcagtgaactctgtggccagcaccaccggtgctcctccctgggccaatctggtgtccatcctggaggagaagaatggcgctgaccctgagttgttggtgtacacggtcaccctcatcaacaagacgctggcggcgctcccggaccaggactccttctacgatgtgacggatgcactggagcagcagggcatggaagcgctggtccagcgccacctgggcactgcgggcactgacgtcgacctgcgcacgcagcttgtgctctacgagaacgccctgaaattggaggatggagacatcgaagaagccccaggcgctggtgggcggcgggaacgacgaaagccttcttctgaggagggcaagaggagccgccgttctctggaaggcgggggctgccccgcgcgtgccccggaacctggccccacaggccccgcctcaccggtaggccccacctcttccaccggccccgccctgctgacaggccccgcctccagccctgtgggccctccctccggtctccaagcttcagtgaacctttttcctaccatctctgtggcaccctcagctgacacctccagcgagaggagcatctacaaagcccggttcctggagaatgtggcggcagcagaaacagagaagcaggttgcgctggcccagggccgggcagagacacttgccggggccatgcccaatgaggcgggtggacacccagatgcccggcaactctgggactccccagagacagcccctgcagccagaacaccccagagccctgccccctgtgtcctgctccgggcccagcgaagccttgcaccagagcccaaggagccactgataccagcaagccccaaggctgagcccatctgggagctccctacccgtgcacccaggctctctattggggacctggacttttcagatctaggggaggatgaagaccaggacatgctgaatgtagagtctgtggaggctgggaaagacatcccagctccctcacccccactgcccctgctctcgggagtacccccccctcccccacttccacctcccccacccatcaaaggccccttcccaccacctccacctctacctctggctgcccctcttccccattcagtgcctgacagctcagccctccccactaagaggaagacagtaaaacttttctggcgtgagctgaagctggctgggggccatggagtctctgcaagccgctttgggccctgcgccaccctctgggcttcactggaccctgtctcagtggacacggcccgactggaacacctctttgagtctcgtgccaaagaggtgctgccctccaagaaagctggagagggccgccggacaatgaccacagtgctggaccccaagcgcagcaacgccatcaacatcggcctaaccacactgccacctgtgcatgtcattaaggctgctctgctcaactttgatgagtttgctgtcagcaaggatggcattgagaagctactgaccatgatgcccacggaggaagagcggcagaagattgaggaagcccagctggccaaccctgacatacccctgggcccagccgagaacttcctgatgactcttgcctccattggcggcctcgctgctcgtctacaactctgggccttcaagctggactatgacagcatggagcgggaaattgctgagccactgtttgacctgaaagtgggtatggaacagctggtacagaatgccaccttccgctgcatcctggctaccctcctagctgtgggcaacttcctcaatggctcccagagcagcggctttgagctgagctacctggagaaggtgtcagaggtgaaggacacggtgcgtcgacagtcactgctacaccatctctgctccctagtgctccagacccggcctgagtcctctgacctctattcagaaatccctgccctgacccgctgtgccaaggtggactttgaacagctgactgagaacctggggcagctggagcgccggagccgggcagccgaggagagcctgcggagcttggccaagcatgagctggccccagccctgcgtgcccgcctcacccacttcctggaccagtgtgcccgccgtgttgccatgctaaggatagtgcaccgccgtgtctgcaataggttccatgccttcctgctctacctgggctacaccccgcaggcggcccgtgaagtgcgcatcatgcagttctgccacacgctgcgggaatttgcgcttgagtatcggacttgccgggaacgagtgctacagcagcagcagaagcaggccacataccgtgagcgcaacaagacccggggacgcatgatcaccgagacagagaagttctcaggtgtggctggggaagcccccagcaacccctctgtcccagtagcagtgagcagcgggccaggccggggtgatgctgacagtcatgccagcatgaagattctgctcaccagcaagcctgaggacaccacacatggtcgccgcagcagaggcatggtccagaacagctccccagtcgtgcccacagcagtggggccctccactgtacccccagaagaatccccaggctccagtttacccagtgacacttcagatgagatcatggacctgctagtgcagtcagtgaccaagagcagtcctcgcgccttagctgctcgagaacgcaagcgttcccgtggcaaccgcaagtctttgaggcggacattgaagagcgggctcggagaggacctggtgcaggcactgggactgagcaagggttctgacctggaggtgtga

SEQ ID NO: 198 - DNA, 2417 bp, Unknown
  NAD synthetase 1
ggaaggtccggcgtcccagccgcctacctcgctgggaccctggtcttgctgtcccccgctggcctcctgcccaagcgactgcggccaggatgggccggaaggtgaccgtggccacctgcgcactcaaccagtgggccctggacttcgagggcaatttgcaaagaattttaaagagtattgaaattgccaaaaacagaggagcaagatacaggcttggaccagagctggaaatatgcggctacggatgttgggatcattattacgagtcggacaccctcttgcactcgtttcaagtcctagcggcccttctggagtctcccgtcactcaggacatcatctgcgacgtggggatgcctgtaatgcaccgaaacgtccgctacaactgcagagtgatattcctcaacaggaagatcctgctcatcagacccaagatggccttggccaatgaaggcaactaccgcgagctgcgctggttcaccccgtggtcgaggagtcggcacacagaggagtactttctgcctcggatgatacaggacctgacaaagcaggaaaccgtacccttcggagatgcggtgctggtgacatgggacacctgcattggaagtgagatctgtgaggagctctggacaccccacagcccgcacatcgacatgggcctggatggcgtggagatcatcaccaacgcctcgggcagccaccacgtgctgcgcaaagccaacaccagggtggatctcgtgactatggtcaccagcaagaacggtgggatttacttgctggccaaccagaagggttgcgacggggaccgcctgtactacgacggctgtgccatgatcgccatgaacggaagcgtctttgctcaaggatcccagttttctctggatgacgtggaagtcctgacggccacgctggatctggaggacgtccggagctacagggcggagatttcatctcgaaacctggcggccagcagggcgagcccctaccccagagtgaaggtggactttgccctctcgtgccacgaggacttgctggcacccatctctgagcccatcgagtggaaataccacagccctgaggaggagataagccttggacctgcctgctggctctgggattttttaagacgaagtcaacaggcagggtttttgctgcccttgagtggcggggtggacagcgcagccaccgcctgcctcatctactccatgtgctgccaggtctgcgaggccgtgaggagtggaaatgaggaagtgctggctgatgtccgcaccatcgtgaaccagatcagctacaccccccaggatccccgagacctctgtggacgcatactgaccacctgctacatggccagcaagaactcctcccaggagacgtgcacccgggccagagagttggcccagcagattggaagccaccacatcagtctcaacatcgatccagccgtgaaggccgtcatgggcatcttcagcctggtgacggggaagagccctctgtttgcagctcatggaggaagcagcagggaaaacctggcgctgcaaaatgtgcaggctcgaatacggatggtcctcgcctatctgtttgctcagttgagcctctggtctcggggtgtccacggtgggctcctcgtgctgggatccgccaacgtggatgagagtctcctgggctacctgaccaagtacgactgctccagtgcggacatcaaccccataggcgggatcagcaagacggacctcagggccttcgtccagttctgcatccagcgcttccagcttcctgccctgcagagcatcctgttggcgccggccaccgcagagctggagcccttggctgatggacaggtgtcccagaccgacgaggaagatatggggatgacatatgcggagctctcggtctatgggaaactcaggaaggtggccaagatggggccctacagcatgttctgcaaactcctcggcatgtggagacacatctgcaccccgagacaggtcgctgacaaagtgaagcggtttttctccaagtactccatgaacagacacaagatgaccacgctcacacccgcgtaccacgccgagaactacagccctgaggacaacaggtttgatctgcgaccatttctgtacaacacaagctggccttggcagtttcggtgcatagaaaatcaggtgctacagctcgagagggcagagccacagtccctggacggcgtggactgaggccggttccttcctggaggcctcctgtcctcggggaccccagcacctcatcatcagcattgctggagccaagggtaggagccctacactaggagcccaggatgggacggcgcatcagccgagagggagggaacttttcagtcaaattcctcaaaaagaggctggaataaagcctgggcttaaaaaaaaaaaaaaaaaaaaaaaaaa

SEQ ID NO: 199 - DNA, 2121 bp, Unknown
  NAD synthetase 1
  exon (1)..(2121)
atgggccggaaggtgaccgtggccacctgcgcactcaaccagtgggccctggacttcgagggcaatttgcaaagaattttaaagagtattgaaattgccaaaaacagaggagcaagatacaggcttggaccagagctggaaatatgcggctacggatgttgggatcattattacgagtcggacaccctcttgcactcgtttcaagtcctagcggcccttctggagtctcccgtcactcaggacatcatctgcgacgtggggatgcctgtaatgcaccgaaacgtccgctacaactgcagagtgatattcctcaacaggaagatcctgctcatcagacccaagatggccttggccaatgaaggcaactaccgcgagctgcgctggttcaccccgtggtcgaggagtcggcacacagaggagtactttctgcctcggatgatacaggacctgacaaagcaggaaaccgtacccttcggagatgcggtgctggtgacatgggacacctgcattggaagtgagatctgtgaggagctctggacaccccacagcccgcacatcgacatgggcctggatggcgtggagatcatcaccaacgcctcgggcagccaccacgtgctgcgcaaagccaacaccagggtggatctcgtgactatggtcaccagcaagaacggtgggatttacttgctggccaaccagaagggttgcgacggggaccgcctgtactacgacggctgtgccatgatcgccatgaacggaagcgtctttgctcaaggatcccagttttctctggatgacgtggaagtcctgacggccacgctggatctggaggacgtccggagctacagggcggagatttcatctcgaaacctggcggccagcagggcgagcccctaccccagagtgaaggtggactttgccctctcgtgccacgaggacttgctggcacccatctctgagcccatcgagtggaaataccacagccctgaggaggagataagccttggacctgcctgctggctctgggattttttaagacgaagtcaacaggcagggtttttgctgcccttgagtggcggggtggacagcgcagccaccgcctgcctcatctactccatgtgctgccaggtctgcgaggccgtgaggagtggaaatgaggaagtgctggctgatgtccgcaccatcgtgaaccagatcagctacaccccccaggatccccgagacctctgtggacgcatactgaccacctgctacatggccagcaagaactcctcccaggagacgtgcacccgggccagagagttggcccagcagattggaagccaccacatcagtctcaacatcgatccagccgtgaaggccgtcatgggcatcttcagcctggtgacggggaagagccctctgtttgcagctcatggaggaagcagcagggaaaacctggcgctgcaaaatgtgcaggctcgaatacggatggtcctcgcctatctgtttgctcagttgagcctctggtctcggggtgtccacggtgggctcctcgtgctgggatccgccaacgtggatgagagtctcctgggctacctgaccaagtacgactgctccagtgcggacatcaaccccataggcgggatcagcaagacggacctcagggccttcgtccagttctgcatccagcgcttccagcttcctgccctgcagagcatcctgttggcgccggccaccgcagagctggagcccttggctgatggacaggtgtcccagaccgacgaggaagatatggggatgacatatgcggagctctcggtctatgggaaactcaggaaggtggccaagatggggccctacagcatgttctgcaaactcctcggcatgtggagacacatctgcaccccgagacaggtcgctgacaaagtgaagcggtttttctccaagtactccatgaacagacacaagatgaccacgctcacacccgcgtaccacgccgagaactacagccctgaggacaacaggtttgatctgcgaccatttctgtacaacacaagctggccttggcagtttcggtgcatagaaaatcaggtgctacagctcgagagggcagagccacagtccctggacggcgtggactga

SEQ ID NO: 200 - DNA, 954 bp, Unknown
  Mn-SOD mRNA for manganese superoxide dismutase
gacgcgcgtccgccgcgggccgtgtgtgcggcgcgatctccgaggtgctttgccttctggacggtcaccatgttgtgccgggcggcgtgcagcacgagcaggaagctggtgccagctctggggtctctggggtcccggcagaagcacagcctccccgacttgcagtatgattatggcgctctggagccctacatcaacgcccagatcatgcagctgcaccacagcaagcaccacgcggcctatgtgaacaacctgaacgtcaccgaggagaagtaccaggaggcgctggccaagggggacgtgacagctcagattgctctgcagcctgcactcaagttcaatggtggaggccatatcaatcataccattttctggacaaacctgagccccaatggcgggggagaacccaaagggaaattgctggacgccatcaaacgtgactttggttccttcgacaaatttaaagagaagttgactgctgtatcggctggtgtccaaggctcgggttggggttggcttggtttcaataaggaccagggacgcctccagattgttgcctgtcctaaccaggatcccctgcagggaacaacaggtcttattcccctgctggggattgacgtgtgggagcacgcttattaccttcagtataaaaatgtcaggcctgattatctgaaagccatttggaatgtgatcaactgggagaatgtatctgagagatacatggcttgcaaaaagtaaagcattatcgttacaccgagtgcattaagcaatttccaactatttttgtagtagctcgaagtaccacagtataccagtaagctgctctaggatagcatttctgaatgtggcttattcagatatttgataaacgtaatgctatgaataatttcctgttttacaattttgttattgggcaactgtttgaaaatattaaatgctttgtatgattcggtt

SEQ ID NO: 201 - DNA, 669 bp, Unknown
  Mn-SOD mRNA for manganese superoxide dismutase
  exon (1)..(669)
atgttgtgccgggcggcgtgcagcacgagcaggaagctggtgccagctctggggtctctggggtcccggcagaagcacagcctccccgacttgcagtatgattatggcgctctggagccctacatcaacgcccagatcatgcagctgcaccacagcaagcaccacgcggcctatgtgaacaacctgaacgtcaccgaggagaagtaccaggaggcgctggccaagggggacgtgacagctcagattgctctgcagcctgcactcaagttcaatggtggaggccatatcaatcataccattttctggacaaacctgagccccaatggcgggggagaacccaaagggaaattgctggacgccatcaaacgtgactttggttccttcgacaaatttaaagagaagttgactgctgtatcggctggtgtccaaggctcgggttggggttggcttggtttcaataaggaccagggacgcctccagattgttgcctgtcctaaccaggatcccctgcagggaacaacaggtcttattcccctgctggggattgacgtgtgggagcacgcttattaccttcagtataaaaatgtcaggcctgattatctgaaagccatttggaatgtgatcaactgggagaatgtatctgagagatacatggcttgcaaaaagtaa

SEQ ID NO: 202 - DNA, 1170 bp, Unknown
  ILT11A mRNA for immunoglobulin-like transcript 11 protein
cacggctggagaccatgggaagcagtgccgggacaccttccctcattgcctttcagtgacttgggctgagtatggacccgaggaccccagtgcaggcagacactctccccaaacccaccatctgggctgagccaggctctgtgatccctcgggggaagcctgtggccatcaggtgtcaagggacactggagacccaagagtatcgtctgcataaagagcgaaatccagtgccttgggaccaaaagagccctctggagcccggggaaaaggccaatttctccatcccacacatgacagagaaatattcagggacatatcactgttactatctcggccccactggctggtcagagcacagtgaccccctcgagctggtggtgacaggattctacaccaaacccaccctctcagccctgccgagcccactggtgatctcaggagggaatgtgaccctccagtgtggctcaaagcttggatttgccaggtttgttctcactaaggaaggagaaaacaagacctcctggaccctggattcacagcgacaacccaatgggcagttccaggccctgttccctgtgggccctgtgatccccttccacaagtggatgttcagctgctatggcttttacaggaactaccctcacgtgtggtcacatcctagtgaccccttggagctcctggtctcagcctcacaccctcaagattacacagtggagaatctcatccggatgagtgcagctggcttgatcctggtggtccttgggattctgctatttcaggctcaacacagccagaaaagaccccaagaggcagacaggaagtaaacacaagtgagaaaaatgcacagttcagagtagtagagccttgaaagtaaatcttgtgcacccaggaggttcctgaagagcatctgtggtgtatgatcagtgaactgtctgcaggtcattgtgaggtgtagtagttatcgttcatgtgcagggacaatgtccgctcctttctgccattaaactgagggacattccttcacaagcacttttgagttatcttggtgggtttgtaactttctctctttttgtgaaatcagcatgtatcccaaaggacagatttgggtccacacttccttgcactttcatgctgtggtacaatttcatgtaatacatatatttttaaatt

SEQ ID NO: 203 - DNA, 468 bp, Unknown
  ILT11A mRNA for immunoglobulin - like transcript 11 protein
  exon (1)..(468)
atggacccgaggaccccagtgcaggcaggattctacaccaaacccaccctctcagccctgccgagcccactggtgatctcaggagggaatgtgaccctccagtgtggctcaaagcttggatttgccaggtttgttctcactaaggaaggagaaaacaagacctcctggaccctggattcacagcgacaacccaatgggcagttccaggccctgttccctgtgggccctgtgatccccttccacaagtggatgttcagctgctatggcttttacaggaactaccctcacgtgtggtcacatcctagtgaccccttggagctcctggtctcagcctcacaccctcaagattacacagtggagaatctcatccggatgagtgcagctggcttgatcctggtggtccttgggattctgctatttcaggctcaacacagccagaaaagaccccaagaggcagacaggaagtaa

SEQ ID NO: 204 - DNA, 676 bp, Unknown
  HREV107-3
acatctacgcagcgaaatcgagcctggccttgagggtccacaccgcgagggaagatgcgtgcgcccattccagagcctaagcctggagacctgattgagatttttcgccctttctacagacactgggccatctatgttggcgatggatatgtggttcatctggcccctccaagtgaggtcgcaggagctggtgcagccagtgtcatgtccgccctgactgacaaggccatcgtgaagaaggaattgctgtatgatgtggccgggagtgacaagtaccaggtcaacaacaaacatgatgacaagtactcgccgctgccctgcagcaaaatcatccagcgggcggaggagctggtggggcaggaggtgctctacaagctgaccagtgagaactgcgagcactttgtgaatgagctgcgctatggagtcgcccgcagtgaccaggtcagagatgtcatcatcgctgcaagcgttgcaggaatgggcttggcagccatgagccttattggagtcatgttctcaagaaacaagcgacaaaagcaataactgaaaaagactgtcctgtcagcgatgactttatacatcaagggggtcttgttttgctagagagtttggggtttggtttgtggatttcattgtgatttataataaggcttattttcacagaataaaataaagc

SEQ ID NO: 205 - DNA, 489 bp, Unknown
  HREV107-3
  exon (1)..(489)
atgcgtgcgcccattccagagcctaagcctggagacctgattgagatttttcgccctttctacagacactgggccatctatgttggcgatggatatgtggttcatctggcccctccaagtgaggtcgcaggagctggtgcagccagtgtcatgtccgccctgactgacaaggccatcgtgaagaaggaattgctgtatgatgtggccgggagtgacaagtaccaggtcaacaacaaacatgatgacaagtactcgccgctgccctgcagcaaaatcatccagcgggcggaggagctggtggggcaggaggtgctctacaagctgaccagtgagaactgcgagcactttgtgaatgagctgcgctatggagtcgcccgcagtgaccaggtcagagatgtcatcatcgctgcaagcgttgcaggaatgggcttggcagccatgagccttattggagtcatgttctcaagaaacaagcgacaaaagcaataa

SEQ ID NO: 206 - DNA, 711 bp, Homo sapiens
atgacgcgctgccccgctggccaagcggaagtggagatggcggagctgtacgtgaagccgggcaacaaggaacgcggctggaacgacccgccgcagttctcatacgggctgcagacccaggccggcggacccaggcgctcgctgcttaccaagagggtcgccgcaccccaggatggatcccccagagtccccgcatcagagacttctcctgggcctcccccaatggggcctccacctccttcaagtaaggctcccaggtccccacctgtggggagtggtcctgcctctggcgtggagcccacaagtttcccagtcgagtctgaggctgtgatggaggatgtgctgagacctttggaacaggcattggaagactgccgtggccacacaaggaagcaggtatgtgatgacatcagccgacgcctggcactgctgcaggaacagtgggctggaggaaagttgtcaatacctgtaaagaagagaatggctctactggtgcaagagctttcaagccaccggtgggacgcagcagatgacatccaccgctccctcatggttgaccatgtgactgaggtcagtcagtggatggtaggagttaaaagattaattgcagaaaagaggagtctgttttcagaggaggcagccaatgaagagaaatctgcagccacagctgagaagaaccataccataccaggcttccagcaggcttcataa

SEQ ID NO: 207 - DNA, 711 bp, Homo sapiens; identical to SEQ ID NO: 206
  exon (1)..(711)

SEQ ID NO: 208 - DNA, 1295 bp, Unknown
  G protein-coupled receptor HM74a
cgccactttgctggagcattcactaggcgaggcgctccatcggactcactagccgcactcatgaatcggcaccatctgcaggatcactttctggaaatagacaagaagaactgctgtgtgttccgagatgacttcattgtcaaggtgttgccgccggtgttggggctggagtttatcttcgggcttctgggcaatggccttgccctgtggattttctgtttccacctcaagtcctggaaatccagccggattttcctgttcaacctggcagtggctgactttctactgatcatctgcctgcccttcctgatggacaactatgtgaggcgttgggactggaagtttggggacatcccttgccggctgatgctcttcatgttggctatgaaccgccagggcagcatcatcttcctcacggtggtggcggtagacaggtatttccgggtggtccatccccaccacgccctgaacaagatctccaatcggacagcagccatcatctcttgccttctgtggggcatcactattggcctgacagtccacctcctgaagaagaagatgccgatccagaatggcggtgcaaatttgtgcagcagcttcagcatctgccataccttccagtggcacgaagccatgttcctcctggagttcttcctgcccctgggcatcatcctgttctgctcagccagaattatctggagcctgcggcagagacaaatggaccggcatgccaagatcaagagagccatcaccttcatcatggtggtggccatcgtctttgtcatctgcttccttcccagcgtggttgtgcggatccgcatcttctggctcctgcacacttcgggcacgcagaattgtgaagtgtaccgctcggtggacctggcgttctttatcactctcagcttcacctacatgaacagcatgctggaccccgtggtgtactatttttccagcccatcctttcccaacttcttctccactttgatcaaccgctgcctccagaggaagatgacaggtgagccagataataaccgcagcacgagcgtcgagctcacaggggaccccaacaaaaccagaggcgctccagaggcgttaatggccaactccggtgagccatggagcccctcttatctgggcccaacctctccttaaataaccatgccaagaagggacattgtcaccaagaaccagcatctctggagaaacagttgggctgttgcatcgagtaatgtcactggactcggcctaaggtttcctggaacttccagattcagagaatctgatttagggaaact

SEQ ID NO: 209 - DNA, 1092 bp, Unknown
  G protein-coupled receptor HM74a
  exon (1)..(1092)
atgaatcggcaccatctgcaggatcactttctggaaatagacaagaagaactgctgtgtgttccgagatgacttcattgtcaaggtgttgccgccggtgttggggctggagtttatcttcgggcttctgggcaatggccttgccctgtggattttctgtttccacctcaagtcctggaaatccagccggattttcctgttcaacctggcagtggctgactttctactgatcatctgcctgcccttcctgatggacaactatgtgaggcgttgggactggaagtttggggacatcccttgccggctgatgctcttcatgttggctatgaaccgccagggcagcatcatcttcctcacggtggtggcggtagacaggtatttccgggtggtccatccccaccacgccctgaacaagatctccaatcggacagcagccatcatctcttgccttctgtggggcatcactattggcctgacagtccacctcctgaagaagaagatgccgatccagaatggcggtgcaaatttgtgcagcagcttcagcatctgccataccttccagtggcacgaagccatgttcctcctggagttcttcctgcccctgggcatcatcctgttctgctcagccagaattatctggagcctgcggcagagacaaatggaccggcatgccaagatcaagagagccatcaccttcatcatggtggtggccatcgtctttgtcatctgcttccttcccagcgtggttgtgcggatccgcatcttctggctcctgcacacttcgggcacgcagaattgtgaagtgtaccgctcggtggacctggcgttctttatcactctcagcttcacctacatgaacagcatgctggaccccgtggtgtactatttttccagcccatcctttcccaacttcttctccactttgatcaaccgctgcctccagaggaagatgacaggtgagccagataataaccgcagcacgagcgtcgagctcacaggggaccccaacaaaaccagaggcgctccagaggcgttaatggccaactccggtgagccatggagcccctcttatctgggcccaacctctccttaa

SEQ ID NO: 210 - DNA, 2769 bp, Unknown
  Pleckstrin
gcagaggaggcccagctgctgagaggagttgcctgagagtgacctttgcatctgcctgtccagccagcatggaaccaaagcggatcagagagggctaccttgtgaagaaggggagcgtgttcaatacgtggaaacccatgtgggttgtattgttagaagatggaattgaattctataagaagaaaagtgacaacagccccaaaggaatgatcccgctgaaagggagcactctgactagcccttgtcaagactttggcaaaaggatgtttgtgtttaagatcactacgaccaaacagcaggaccacttcttccaggcagccttcctggaggagagagatgcctgggttcgggatatcaagaaggccattaaatgcattgaaggaggccagaaatttgccaggaaatctaccaggaggtccattcgactgccagaaaccattgacttaggtgccttatatttgtccatgaaagacactgaaaaaggaataaaagaactgaatctagagaaggacaagaagatttttaatcactgcttcacaggtaactgcgtcattgattggctggtatccaaccagtctgttaggaatcgccaggaaggcctcatgattgcttcatcgctgctcaatgaggggtatctgcagcctgctggagacatgtccaagagtgcagtggatggaactgctgaaaaccctttcctggacaaccctgatgccttctactactttccagacagtgggttcttctgtgaagagaattccagtgatgatgatgtgattctgaaagaagaattcagaggggtcattatcaagcagggatgtttactgaagcaggggcatagaaggaaaaactggaaagtgaggaagttcatcttgagagaagaccctgcctacctgcactactatgaccctgctggggcagaagatcccctgggagcaattcacttgagaggctgtgtggtgacttcagtggagagcaactcaaatggcaggaagagtgaggaagagaacctttttgagatcatcacagcagatgaagtgcactatttcttgcaagcagccacccccaaggagcgcacagagtggatcaaagccatccagatggcctcccgaactgggaagtaaagacactcctgcattcctcctcccctcctgagggaagcccacggacaagctcagtccaggacctgtccacttctgtgacaaatcaacgggaaacagcccaggggtgggaagttttcatttgcaggggggtctgaatgtaactcaccatgtggtgtgcaaggttcccctgcattgtattgctcactgcagcccctctgctcctatccatgacccccaagcagatataacaagctgtgcagcctcagtaggctgcttgccctctccaggcctcagggcctcttctggaaaatgaagaaattcaactagtagattcctgaggtccccccagcttaaaaaaaaaaaatctgccccgtgattctaacactcgcagtagtgatagtgtatctagttgttctgctggtgtccttccttggctaagtcttggccttcagttatcttcaaatgtaccagaacctgagccaacgcctccctgtgaaactgttgctgatctgtagtacagtaccaggaagaaacctcttttgttctctttagacatcttctacttgctcttggccttgagatcgtgtaacaaaatgaaggagggctctcttctttcttcctcatcctactcaaaaacttcccgagagcagtggtggttttgagggttttgacttctattacttttggcagcctggaaagttgtgtcttctgggaaagagacccggggaggccaggagtagctgagggtcctttctgtgcccttaaaccgcccagaggagccctattccactctggttttaggctgatctgagagggtctccctttgttcctttctggagcatttctctaacgtttattacaattaggagggggaccccacatctgtgagattctgtttcatttgaggtttacagaaaaaaaaagtggccagatgtgttccccccatgggtgagaggcctgggcaactgcctggtgaatgtgtctcgcggcagctgcagcaagtggaggggctgaactactggccagctcactggatgatgggttaatacaacaactgcactgtaaggactcagagccacacagaacttctgagaggggctgttagcattgcgcagcatcttcagttctccagtaaatgatattgcgttcgtgcctcagctttaagcacaagtagcagcagctcctgcttgagttctgagggcatcatggccctatgattaaccagagtgatctaacctagactaaaattgggaacttatttgcaatttttgaccctgaccactaactagtgattcttctccaaaattgagaaagacagcacccattgaaacagatatgtgtgtgaaagtatatttttcaattccagatttttaattttaaggctccaggaaagaaaggagagtagaacatttttcctcattttatcaaatcctctcttgccctccctcaattcccctgtaacattcctgaagctgttcccactcccagatggttttatcaatagcctagaggtaaagaactgtctttttctctgattctttaataaattatctttatagaatatgcacaagtttttctacactcagtgttaaagtatttattaatgggaagtcaacttaatgttttgaaataaatatatgactctgtttaatgcaaaaaaaaaaaaaaa

SEQ ID NO: 211 - DNA, 1053 bp, Unknown
  Pleckstrin
  exon (1)..(1053)
atggaaccaaagcggatcagagagggctaccttgtgaagaaggggagcgtgttcaatacgtggaaacccatgtgggttgtattgttagaagatggaattgaattctataagaagaaaagtgacaacagccccaaaggaatgatcccgctgaaagggagcactctgactagcccttgtcaagactttggcaaaaggatgtttgtgtttaagatcactacgaccaaacagcaggaccacttcttccaggcagccttcctggaggagagagatgcctgggttcgggatatcaagaaggccattaaatgcattgaaggaggccagaaatttgccaggaaatctaccaggaggtccattcgactgccagaaaccattgacttaggtgccttatatttgtccatgaaagacactgaaaaaggaataaaagaactgaatctagagaaggacaagaagatttttaatcactgcttcacaggtaactgcgtcattgattggctggtatccaaccagtctgttaggaatcgccaggaaggcctcatgattgcttcatcgctgctcaatgaggggtatctgcagcctgctggagacatgtccaagagtgcagtggatggaactgctgaaaaccctttcctggacaaccctgatgccttctactactttccagacagtgggttcttctgtgaagagaattccagtgatgatgatgtgattctgaaagaagaattcagaggggtcattatcaagcagggatgtttactgaagcaggggcatagaaggaaaaactggaaagtgaggaagttcatcttgagagaagaccctgcctacctgcactactatgaccctgctggggcagaagatcccctgggagcaattcacttgagaggctgtgtggtgacttcagtggagagcaactcaaatggcaggaagagtgaggaagagaacctttttgagatcatcacagcagatgaagtgcactatttcttgcaagcagccacccccaaggagcgcacagagtggatcaaagccatccagatggcctcccgaactgggaagtaa

SEQ ID NO: 212 - DNA, 2074 bp, Unknown
  Selenoprotein P
gtggagctgccagagtaaagcaaagagaaaggaagcaggcccgttggaagtggttgtgacaaccccagcaatgtggagaagcctggggcttgccctggctctctgtctcctcccatcgggaggaacagagagccaggaccaaagctccttatgtaagcaacccccagcctggagcataagagatcaagatccaatgctaaactccaatggttcagtgactgtggttgctcttcttcaagccagctgatacctgtgcatactgcaggcatctaaattagaagacctgcgagtaaaactgaagaaagaaggatattctaatatttcttatattgttgttaatcatcaaggaatctcttctcgattaaaatacacacatcttaagaataaggtttcagagcatattcctgtttatcaacaagaagaaaaccaaacagatgtctggactcttttaaatggaagcaaagatgacttcctcatatatgatagatgtggccgtcttgtatatcatcttggtttgcctttttccttcctaactttcccatatgtagaagaagccattaagattgcttactgtgaaaagaaatgtggaaactgctctctcacgactctcaaagatgaagacttttgtaaacgtgtatctttggctactgtggataaaacagttgaaactccatcgcctcattaccatcatgagcatcatcacaatcatggacatcagcaccttggcagcagtgagctttcagagaatcagcaaccaggagcaccaaatactcctactcatcctgctcctccaggccttcatcaccaccataagcacaagggtcagcataggcagggtcacccagagaaccgagatatgccagcaagtgaagatttacaagatttacaaaagaagctctgtcgaaagagatgtataaatcaattactctgtaaattgcccacagattcagagttggctcctaggagctgatgctgccattgtcgacatctgatatttgaaaaaacagggtctgcaatcacctgacagtgtaaagaaaacctcccatctttatgtagctgacagggacttcgggcagaggagaacataactgaatcttgtcagtgacgtttgcctccagctgcctgacaaataagtcagcagcttatacccacagaagccagtgccagttgacgctgaaagaatcaggcaaaaaagtgagaatgaccttcaaactaaatatttaaaataggacatactccccaatttagtctagacacaatttcatttccagcatttttataaactaccaaattagtgaaccaaaaatagaaatcagatttgtgcaaacatggagaaatctactgaattggcttccagattttaaattttatgtcatagaaatattgactcaaaccatattttttatgatggagcaactgaaaggtgattgcagcttttggttaatatgtctttttttttctttttccagtgttctatttgctttaatgagaatagaaacgtaaactatgacctaggggtttctgttggataattagcagtttagaatggaggaagaacaacaaagacatgctttccatttttttctttacttatctctcaaaacaatattactttgtcttttcaatcttctacttttaactaataaaataagtggattttgtattttaagatccagaaatacttaacacgtgaatattttgctaaaaaagcatatataactattttaaatatccatttatcttttgtatatctaagactcatcctgatttttactatcacacatgaataaagcctttgtatctttctttctctaatgttgtatcatactcttctaaaacttgagtggctgtcttaaaagatataaggggaaagataatattgtctgtctctatattgcttagtaagtatttccatagtcaatgatggtttaataggtaaaccaaaccctataaacctgacctcctttatggttaatactattaagcaagaatgcagtacagaattggatacagtacggatttgtccaaataaattcaataaaaaccaaaaaaaaaaaaaaaaaaaaaaaaaaaa

SEQ ID NO: 213 - DNA, 1146 bp, Unknown
  Selenoprotein P
  exon (1)..(1146)
atgtggagaagcctggggcttgccctggctctctgtctcctcccatcgggaggaacagagagccaggaccaaagctccttatgtaagcaacccccagcctggagcataagagatcaagatccaatgctaaactccaatggttcagtgactgtggttgctcttcttcaagccagctgatacctgtgcatactgcaggcatctaaattagaagacctgcgagtaaaactgaagaaagaaggatattctaatatttcttatattgttgttaatcatcaaggaatctcttctcgattaaaatacacacatcttaagaataaggtttcagagcatattcctgtttatcaacaagaagaaaaccaaacagatgtctggactcttttaaatggaagcaaagatgacttcctcatatatgatagatgtggccgtcttgtatatcatcttggtttgcctttttccttcctaactttcccatatgtagaagaagccattaagattgcttactgtgaaaagaaatgtggaaactgctctctcacgactctcaaagatgaagacttttgtaaacgtgtatctttggctactgtggataaaacagttgaaactccatcgcctcattaccatcatgagcatcatcacaatcatggacatcagcaccttggcagcagtgagctttcagagaatcagcaaccaggagcaccaaatactcctactcatcctgctcctccaggccttcatcaccaccataagcacaagggtcagcataggcagggtcacccagagaaccgagatatgccagcaagtgaagatttacaagatttacaaaagaagctctgtcgaaagagatgtataaatcaattactctgtaaattgcccacagattcagagttggctcctaggagctgatgctgccattgtcgacatctgatatttgaaaaaacagggtctgcaatcacctgacagtgtaaagaaaacctcccatctttatgtagctgacagggacttcgggcagaggagaacataactgaatcttgtcagtgacgtttgcctccagctgcctgacaaataagtcagcagcttatacccacagaagccagtgccagttgacgctgaaagaatcaggcaaaaaagtgagaatgaccttcaaactaa

SEQ ID NO: 214 - DNA, 906 bp, Unknown
  Ribosomal protein S3A
cgcgactcccacttccgcccttttggctctctgaccagcaccatggcggttggcaagaacaagcgccttacgaaaggcggcaaaaagggagccaagaagaaagtggttgatccattttctaagaaagattggtatgatgtgaaagcacctgctatgttcaatataagaaatattggaaagacgctcgtcaccaggacccaaggaaccaaaattgcatctgatggtctcaagggtcgtgtgtttgaagtgagtcttgctgatttgcagaatgatgaagttgcatttagaaaattcaagctgattactgaagatgttcagggtaaaaactgcctgactaacttccatggcatggatcttacccgtgacaaaatgtgttccatggtcaaaaaatggcagacaatgattgaagctcacgttgatgtcaagactaccgatggttacttgcttcgtctgttctgtgttggttttactaaaaaacgcaacaatcagatacggaagacctcttatgctcagcaccaacaggtccgccaaatccggaagaagatgatggaaatcatgacccgagaggtgcagacaaatgacttgaaagaagtggtcaataaattgattccagacagcattggaaaagacatagaaaaggcttgccaatctatttatcctctccatgatgtcttcgttagaaaagtaaaaatgctgaagaagcccaagtttgaattgggaaagctcatggagcttcatggtgaaggcagtagttctggaaaagccactggggacgagacaggtgctaaagttgaacgagctgatggatatgaaccaccagtccaagaatctgtttaaagttcagacttcaaatagtggcaaataaaaagtgctatttgtaaaaaaaaaaaaaaaaaaaaaaaaaaa

SEQ ID NO: 215 - DNA, 795 bp, Unknown
  Ribosomal protein S3A
  exon (1)..(795)
atggcggttggcaagaacaagcgccttacgaaaggcggcaaaaagggagccaagaagaaagtggttgatccattttctaagaaagattggtatgatgtgaaagcacctgctatgttcaatataagaaatattggaaagacgctcgtcaccaggacccaaggaaccaaaattgcatctgatggtctcaagggtcgtgtgtttgaagtgagtcttgctgatttgcagaatgatgaagttgcatttagaaaattcaagctgattactgaagatgttcagggtaaaaactgcctgactaacttccatggcatggatcttacccgtgacaaaatgtgttccatggtcaaaaaatggcagacaatgattgaagctcacgttgatgtcaagactaccgatggttacttgcttcgtctgttctgtgttggttttactaaaaaacgcaacaatcagatacggaagacctcttatgctcagcaccaacaggtccgccaaatccggaagaagatgatggaaatcatgacccgagaggtgcagacaaatgacttgaaagaagtggtcaataaattgattccagacagcattggaaaagacatagaaaaggcttgccaatctatttatcctctccatgatgtcttcgttagaaaagtaaaaatgctgaagaagcccaagtttgaattgggaaagctcatggagcttcatggtgaaggcagtagttctggaaaagccactggggacgagacaggtgctaaagttgaacgagctgatggatatgaaccaccagtccaagaatctgtttaa

SEQ ID NO: 216 - DNA, 444 bp, Unknown
  Hemoglobin beta
atggtgcaactgagtggtgaagagaaggcagctgtcttggccctgtgggacaaggtgaacgaggaagaagttggtggtgaagccctgggcaggctgctggttgtctacccatggactcagaggttctttgactcctttggggatctgtccaatcctggtgctgtgatgggcaaccccaaggtgaaggcccacggcaagaaagtgctacactcctttggtgagggcgtgcatcatcttgacaacctcaagggcacctttgctgcgctgagtgagctgcactgtgacaagctgcacgtggatcctgagaacttcaggctcctgggcaacgtgctggttgttgtgctggctcgccactttggcaaggatttcaccccagagttgcaggcttcctatcaaaaggtggtggctggtgtggccaatgcactggcccacaaataccactga

SEQ ID NO: 217 - DNA, 444 bp, Unknown; identical to SEQ ID NO: 216
  Hemoglobin, beta
  exon (1)..(444)

SEQ ID NO: 218 - DNA, 582 bp, Equus caballus
atggctgctggaccagtagaagacaattgcattagcttggtggaaatgaaatttattgacaacacactttactttgtagctgaaaacgatgaaaacctggaatcagattactttggcaggcttgaacctaaactctcaatcatacgaaatttgaacgaccaagttctcttcattaaccagggaaatcaacctgtgtttgaggatatgcctgattctgattgtacagacaacgcaccccagaccgtatttatcatatatatgtataaagatagcctcactagaggtctagcggtaaccatctctgtgaagtgtgagaaaacgtctactctctcctgtaagaacaaaattatttcctttaaggaaatgagtcctcctgagaatatcaatgatgaaggaaatgacatcatattctttcagagaagtgttccaggacatgatgataagatacagtttgagtcttcactgtataaaggatactttctagcttgtgaaaaagagaatgatcttttcaaactcattttgaaagaaaaggatgaaaatggggataaatctgtaatgttcactgttcaaaaccagaactag

SEQ ID NO: 219 - DNA, 582 bp, Equus caballus; identical to SEQ ID NO: 218
  exon (1)..(582)

SEQ ID NO: 220 - DNA, 1171 bp, Ovis aries
cactcctcaactcttcaggcagtctgagctactgcagaagtaccttcagttgcagcaccatgaacaaaagtggttttcttattttctgccttatccttctgactctgagtcaaggcatacctctctctaggaacacacgctgcacctgcatcgagatcagtaatggatctgttaatccaaggtccttagaaaaacttgaactgattcctgcaagtcaatcctgcccacgtgtcgagattattgccacaatgaaaaggaatggggagaaaagatgtctgaatccagaatctaagaccatcaagaatttactgaaagcaattaacaagcaaaggactaaaagatctcctcgaacacagaaagaggcataatcactgcactactgataagatggaccagagagaagctacctctacaattgtttccctgtgtacagtatatgtcaagccctaattgttcgtggacttcagttctcctaaaaggtgaccaagccagtcaccaaatcagctgctactactcctgcagggggagggtggctcatcaccctgagctgttcagtagtgactctgccctggcactgtgactgtaagctataccggggcgctacgttctcagttaatgtgctaagtcccagccttgctactgacagcttcttcccctttccaatctttctaggttattaagggatctttccagctctgggcttattagagaccttaggatctcaaataactaagagacattcaaaccaataatgcaatctgctttttaaagaaagatctttactccaggggcttcactgccatccctccaaggggcccgtattctttcaggtgttatgtacatagttccaaatatacagaagcagccagaaatatctggaaatgtaggtctaaacagtattacttagtcaaaaactatacaaagtagaattcttgaagatatatgtttcttatatgattttcagtgttcatggaataacttgtatacaactatcaacttatgtaattattgcaatggaataaatttttaaatttagatacatgttctgcaggctatgtaagacaaatatgctaaatgctttccaaaataaaagtaatgttctctcccagaaatactaagaaagattatgtaattgttttagaggccaaaaacataataaataattataact

SEQ ID NO: 221 - DNA, 309 bp, Ovis aries
  exon (1)..(309)
atgaacaaaagtggttttcttattttctgccttatccttctgactctgagtcaaggcatacctctctctaggaacacacgctgcacctgcatcgagatcagtaatggatctgttaatccaaggtccttagaaaaacttgaactgattcctgcaagtcaatcctgcccacgtgtcgagattattgccacaatgaaaaggaatggggagaaaagatgtctgaatccagaatctaagaccatcaagaatttactgaaagcaattaacaagcaaaggactaaaagatctcctcgaacacagaaagaggcataa

SEQ ID NO: 222 - DNA, 462 bp, Unknown
  Calcium-binding protein in macrophages (MRP-14) macrophage migration inhibitory factor (MIF)-related protein
aaaacactctgtgtggctcctcggctttgacagagtgcaagacgatgacttgcaaaatgtcccagatggagcgcgacatagagaccatcatcaatgtcttccaccagtactctgtgcgactggggcacccggacaccctgaaccggaaggaattcaaacagctggttcaaaaagagctggcgaacttcctcaagagtaagaagaaggatgagaaagccataaatcatatcatggaggacctggataccaatgaagacaagcagctgagtttcgaggagttcatcatcctggtggccaggctgacgcatgcctcccatgagaagatgcacgagcatgaccaaggccacggccactgccatgggccaggccttggggagggcaccccctaagaccacagtggccaagatcacagtggccacggccacggccacagtcatggtggccacggccacagccacccat

SEQ ID NO: 223 - DNA, 345 bp, Unknown
  Calcium-binding protein in macrophages
  exon (1)..(345)
atgacttgcaaaatgtcccagatggagcgcgacatagagaccatcatcaatgtcttccaccagtactctgtgcgactggggcacccggacaccctgaaccggaaggaattcaaacagctggttcaaaaagagctggcgaacttcctcaagagtaagaagaaggatgagaaagccataaatcatatcatggaggacctggataccaatgaagacaagcagctgagtttcgaggagttcatcatcctggtggccaggctgacgcatgcctcccatgagaagatgcacgagcatgaccaaggccacggccactgccatgggccaggccttggggagggcaccccctaa

SEQ ID NO: 224 - DNA, 3164 bp, Unknown
  Villin 2
cgcggcaggaggacgaggcagggcgggcgggcgctctaagggttctgctctgactccaggttgggacagcgtcttcgctgctgctggatagtcgtgttttcggggatcgaggatactcaccagaaaccgaaaatgccgaaaccaatcaatgtccgagttaccaccatggatgcagagctggagtttgcaatccagccaaatacaactggaaaacagctttttgatcaggtggtaaagactatcggcctccgggaagtgtggtactttggcctccactatgtggataataaaggatttcctacctggctgaagctggataagaaggtgtctgcccaggaggtcaggaaggagaatcccctccagttcaagttccgggccaagttctaccctgaagatgtggctgaggagctcatccaggacatcacccagaaacttttcttcctccaagtgaaggaaggaatccttagcgatgagatctactgcccccctgagactgccgtgctcttggggtcctacgctgtgcaggccaagtttggggactacaacaaagaagtgcacaagtctgggtacctcagctctgagcggctgatccctcaaagagtgatggaccagcacaaacttaccagggaccagtgggaggaccggatccaggtgtggcatgcggaacaccgtgggatgctcaaagataatgctatgttggaatacctgaagattgctcaggacctggaaatgtatggaatcaactatttcgagataaaaaacaagaaaggaacagacctttggcttggagttgatgcccttggactgaatatttatgagaaagatgataagttaaccccaaagattggctttccttggagtgaaatcaggaacatctctttcaatgacaaaaagtttgtcattaaacccatcgacaagaaggcacctgactttgtgttttatgccccacgtctgagaatcaacaagcggatcctgcagctctgcatgggcaaccatgagttgtatatgcgccgcaggaagcctgacaccatcgaggtgcagcagatgaaggcccaggcccgggaggagaagcatcagaagcagctggagcggcaacagctggaaacagagaagaaaaggagagaaaccgtggagagagagaaagagcagatgatgcgcgagaaggaggagttgatgctgcggctgcaggactatgaggagaagacaaagaaggcagagagagagctctcggagcagattcagagggccctgcagctggaggaggagaggaagcgggcacaggaggaggccgagcgcctagaggctgaccgtatggctgcactgcgggctaaggaggagctggagagacaggcggtggatcagataaagagccaggagcagctggctgcggagcttgcagaatacactgccaagattgccctcctggaagaggcgcggaggcgcaaggaggatgaagttgaagagtggcagcacagggccaaagaagcccaggatgacctggtgaagaccaaggaggagctgcacctggtgatgacagcacccccgcccccaccaccccccgtgtacgagccggtgagctaccatgtccaggagagcttgcaggatgagggcgcagagcccacgggctacagcgcggagctgtctagtgagggcatccgggatgaccgcaatgaggagaagcgcatcactgaggcagagaagaacgagcgtgtgcagcggcagctgctgacgctgagcagcgagctgtcccaggcccgagatgagaataagaggacccacaatgacatcatccacaacgagaacatgaggcaaggccgggacaagtacaagacgctgcggcagatccggcagggcaacaccaagcagcgcatcgacgagttcgaggccctgtaacagccaggccaggaccaagggcagaggggtgctcatagcgggcgctgccagccccgccacgcttgtgtctttagtgctccaagtctaggaactccctcagatcccagttcctttagaaagcagttacccaacagaaacattctgggctgggaaccagggaggcgccctggtttgttttccccagttgtaatagtgccaagcaggcctgattctcgcgattattctcgaatcacctcctgtgttgtgctgggagcaggactgattgaattacggaaaatgcctgtaaagtctgagtaagaaacttcatgctggcctgtgtgatacaagagtcagcatcattaaaggaaacgtggcaggacttccatctgtgccatacttgttctgtattcgaaatgagctcaaattgattttttaatttctatgaaggatccatctttgtatatttacatgcttagaggggtgaaaattattttggaaattgagtctgaagcactctcgcacacacagtgattccctcctcccgtcactccacgcagctggcagagagcacagtgatcaccagcgtgagtggtggaggaggacacttggatttttttttttgttttttttttttttgcttaacagttttagaatacattgtacttatacaccttattaatgatcagctatatactatttatatacaagtgataatacagatttgtaacattagttttaaaaagggaaagttttgttctgtatattttgttaccttttacagaataaaagaattacatatgaaaaaccctctaaaccatggcacttgatgtgatgtggcaggagggcagtggtggagctggacctgcctgctgcagtcacgtgtaaacaggattattattagtgttttatgcatgtaatggactatgcacacttttaattttgtcagattcacacatgccactatgagctttcagactccagctgtgaagagactctgtttgcttgtgtttgtttgtttgcagtctctctctgccatggccttggcaggctgctggaaggcagcttgtggaggccgttggttccgcccactcattccttctcgtgcactgctttctccttcacagctaagatgccatgtgcaggtggattccatgccgcagacatgaaataaaagctttgcaaaggcacgaaaaaaaaaaaaaaaaaaaaaaaaaaaaaaaaaaaaaaaaaaaaaaaaaaaaaaaaaaaaaaaaaaaaaaaaaaaaaaaaaaaaaaaaaaaaaaaaaaaaaaa

SEQ ID NO: 225 - DNA, 1761 bp, Unknown
  Villin 2
  exon (1)..(1761)
atgccgaaaccaatcaatgtccgagttaccaccatggatgcagagctggagtttgcaatccagccaaatacaactggaaaacagctttttgatcaggtggtaaagactatcggcctccgggaagtgtggtactttggcctccactatgtggataataaaggatttcctacctggctgaagctggataagaaggtgtctgcccaggaggtcaggaaggagaatcccctccagttcaagttccgggccaagttctaccctgaagatgtggctgaggagctcatccaggacatcacccagaaacttttcttcctccaagtgaaggaaggaatccttagcgatgagatctactgcccccctgagactgccgtgctcttggggtcctacgctgtgcaggccaagtttggggactacaacaaagaagtgcacaagtctgggtacctcagctctgagcggctgatccctcaaagagtgatggaccagcacaaacttaccagggaccagtgggaggaccggatccaggtgtggcatgcggaacaccgtgggatgctcaaagataatgctatgttggaatacctgaagattgctcaggacctggaaatgtatggaatcaactatttcgagataaaaaacaagaaaggaacagacctttggcttggagttgatgcccttggactgaatatttatgagaaagatgataagttaaccccaaagattggctttccttggagtgaaatcaggaacatctctttcaatgacaaaaagtttgtcattaaacccatcgacaagaaggcacctgactttgtgttttatgccccacgtctgagaatcaacaagcggatcctgcagctctgcatgggcaaccatgagttgtatatgcgccgcaggaagcctgacaccatcgaggtgcagcagatgaaggcccaggcccgggaggagaagcatcagaagcagctggagcggcaacagctggaaacagagaagaaaaggagagaaaccgtggagagagagaaagagcagatgatgcgcgagaaggaggagttgatgctgcggctgcaggactatgaggagaagacaaagaaggcagagagagagctctcggagcagattcagagggccctgcagctggaggaggagaggaagcgggcacaggaggaggccgagcgcctagaggctgaccgtatggctgcactgcgggctaaggaggagctggagagacaggcggtggatcagataaagagccaggagcagctggctgcggagcttgcagaatacactgccaagattgccctcctggaagaggcgcggaggcgcaaggaggatgaagttgaagagtggcagcacagggccaaagaagcccaggatgacctggtgaagaccaaggaggagctgcacctggtgatgacagcacccccgcccccaccaccccccgtgtacgagccggtgagctaccatgtccaggagagcttgcaggatgagggcgcagagcccacgggctacagcgcggagctgtctagtgagggcatccgggatgaccgcaatgaggagaagcgcatcactgaggcagagaagaacgagcgtgtgcagcggcagctgctgacgctgagcagcgagctgtcccaggcccgagatgagaataagaggacccacaatgacatcatccacaacgagaacatgaggcaaggccgggacaagtacaagacgctgcggcagatccggcagggcaacaccaagcagcgcatcgacgagttcgaggccctgtaa

SEQ ID NO: 226 - DNA, 2854 bp, Unknown
  cDNA FLJ16386 fis, clone
agaactcacatcggatgattcaggcatggctctgctaacactttattaaaagcatggattaattttacttccaagtttatttttactgcaccgtcccatttgtggaaacaactagcttactcagcttttttttccttttataaaggaaagaacagaaaagtaaaaggaggaaagaaaacaagaggtgagtgaggcaactgaaaactgttcttggacctgcggtgctatagagcaggctcttctaggttggcagttgccatggaatctggacccaaaatgttggcccccgtttgcctggtggaaaataacaatgagcagctattggtgaaccagcaagctatacagattcttgaaaagatttctcagccagtggtggtggtggccattgtaggactgtaccgtacagggaaatcctacttgatgaaccatctggcaggacagaatcatggcttccctctgggctccacggtgcagtctgaaaccaagggcatctggatgtggtgcgtgccccacccatccaagccaaaccacaccctggtccttctggacaccgaaggtctgggcgatgtggaaaagggtgaccctaagaatgactcctggatctttgccctggctgtgctcctgtgcagcacctttgtctacaacagcatgagcaccatcaaccaccaggccctggagcagctgcattatgtgacagagctcacagagctcatcagggcaaagtcttccccaagacctgatgaagtacaagattccacagagtttgtgagtttctttccagactttatctggactgtacgggatttcaccctggagctgaagttagacggtcaccctatcacagaagatgagtacttggagaatgccttgaagctgattccaggcaagaatcccaaagtccaagcgtccaatctacccagagagtgcatcaggctattctttccaaaacggaaatgttttgtatttgaccggccaataaacgacaaagcactcctagctgacattgagaatgtgtctgaaaacgaactggattctaaattccaagaacaaataaacaagttctgttctcacatcttcacccatgcaagacctaagactcttagagagggaatcatggtcactgggaatcggctgaggactctggtggtgacctatgtggataccatcaatactggagcagtgccttgtttggagaatgcagtgagaactctggcccaacttgagaactcagtggccatgcagaaggcagcggaccattacagtgagcagatggccgagaaattgaagttgcccacagacacactccaggagctgctggacgtgcacacagcctgtgagagagaggccattgcatttttcatggagcactccttcaaggatgaaaatcaggaattccagaagaagttcatggaaaccacaatgaataagaagggggatttcttgctgcagaatgaagagtcatctgttcaatactgccaggctaaactcaatgagctctcaaagggactaatggaaagtatctcagcaggaagtttctctgttcctggagggcacaagctctacatggaaacaaaggaaaggattgaacaggactattggcaagttcccaggaaaggagtaaaggcaaaagaggtcttccagaggttcctggagtcacagatggtgatagaggaatccatcttgcagtcagataaagccctcactgatagagagaaggcagtagcagtggatcgggccaagaaggaggcagctgagaaggaacaggaacttttaaaacagaaattacaggagcagcagcaacagatggaggctcaagataagagtcgcaaggaaaacatagcccaactgaaggagaagctgcagatggagagagaacacctactgagagagcagattatgatgttggagcacacgcagaaggtccaaaatgattggcttcatgaaggatttaagaagaagtatgaggagatgaatgcagagataagtcaatttaaacgtatgattgatactacaaaaaatgatgatactccctggattgcacgaaccttggacaaccttgccgatgagctaactgcaatattgtctgctcctgctaaattaattggtcatggtgtcaaaggtgtgagctcactctttaaaaagcataagctccccttttaaggatattatagattgtacatatatgctttggactatttttgatctgtatgtttttcattttcattcagcaagtttttttttttttcagagtcttactctgttgcccaggctggagtacagtggtgcaatctcagctcactgcaacctctgcctcctgggttcaagagattcacctgcctcagccccctagtagctgggattataggtgtacaccaccacacccagctaatttttgtatttttagtagagatggggtttcactatgttggccaggctggtctcgaactcttgacctcaaatgatccacccgcctcggcctcccaaagtgctgggtttacaggcatgagccaccatgcccagccctcatttagcaaagttttaaacatgaaaagtgcttattagaggatatcagtgcctggcccacatgagagaacagatccatacacactttgaaaaactttgttcacttttaggaaatataattttgaaaaatcatttacatacaagaggtccactgaggcattgcttttaatggcaaaatattgcaatgtacttgaatgtccttcacattagattggtaagataaattttagtatgtgcatgtactggaatattatatagccagtaaacaaattgacaatgaagctctatttgtaccagtaaagaatggtcttgaagagacattgtaaaatga

SEQ ID NO: 227 - DNA, 1902 bp, Unknown
  cDNA FLJ16386 fis clone
  exon (1)..(1902)
atggaatctggacccaaaatgttggcccccgtttgcctggtggaaaataacaatgagcagctattggtgaaccagcaagctatacagattcttgaaaagatttctcagccagtggtggtggtggccattgtaggactgtaccgtacagggaaatcctacttgatgaaccatctggcaggacagaatcatggcttccctctgggctccacggtgcagtctgaaaccaagggcatctggatgtggtgcgtgccccacccatccaagccaaaccacaccctggtccttctggacaccgaaggtctgggcgatgtggaaaagggtgaccctaagaatgactcctggatctttgccctggctgtgctcctgtgcagcacctttgtctacaacagcatgagcaccatcaaccaccaggccctggagcagctgcattatgtgacagagctcacagagctcatcagggcaaagtcttccccaagacctgatgaagtacaagattccacagagtttgtgagtttctttccagactttatctggactgtacgggatttcaccctggagctgaagttagacggtcaccctatcacagaagatgagtacttggagaatgccttgaagctgattccaggcaagaatcccaaagtccaagcgtccaatctacccagagagtgcatcaggctattctttccaaaacggaaatgttttgtatttgaccggccaataaacgacaaagcactcctagctgacattgagaatgtgtctgaaaacgaactggattctaaattccaagaacaaataaacaagttctgttctcacatcttcacccatgcaagacctaagactcttagagagggaatcatggtcactgggaatcggctgaggactctggtggtgacctatgtggataccatcaatactggagcagtgccttgtttggagaatgcagtgagaactctggcccaacttgagaactcagtggccatgcagaaggcagcggaccattacagtgagcagatggccgagaaattgaagttgcccacagacacactccaggagctgctggacgtgcacacagcctgtgagagagaggccattgcatttttcatggagcactccttcaaggatgaaaatcaggaattccagaagaagttcatggaaaccacaatgaataagaagggggatttcttgctgcagaatgaagagtcatctgttcaatactgccaggctaaactcaatgagctctcaaagggactaatggaaagtatctcagcaggaagtttctctgttcctggagggcacaagctctacatggaaacaaaggaaaggattgaacaggactattggcaagttcccaggaaaggagtaaaggcaaaagaggtcttccagaggttcctggagtcacagatggtgatagaggaatccatcttgcagtcagataaagccctcactgatagagagaaggcagtagcagtggatcgggccaagaaggaggcagctgagaaggaacaggaacttttaaaacagaaattacaggagcagcagcaacagatggaggctcaagataagagtcgcaaggaaaacatagcccaactgaaggagaagctgcagatggagagagaacacctactgagagagcagattatgatgttggagcacacgcagaaggtccaaaatgattggcttcatgaaggatttaagaagaagtatgaggagatgaatgcagagataagtcaatttaaacgtatgattgatactacaaaaaatgatgatactccctggattgcacgaaccttggacaaccttgccgatgagctaactgcaatattgtctgctcctgctaaattaattggtcatggtgtcaaaggtgtgagctcactctttaaaaagcataagctccccttttaa

SEQ ID NO: 228 - DNA, 1345 bp, Unknown
  Farnesyl diphosphate synthase
ggaacaggatgcccctgtcccgctggttgagatctgtgggggtcttcctgctgccagccccctactgggcaccccgggagaggtggctgggttccctacggcggccctccctggtgcacgggtacccagtcctggcctggcacagtgcccgctgctggtgccaagcgtggacagaggaacctcgagccctttgctcctccctcagaatgaacggagaccagaattcagatgtttatgcccaagaaaagcaggatttcgttcagcacttctcccagatcgttagggtgctgactgaggatgagatggggcacccagagataggagatgctattgcccggctcaaggaggtcctggagtacaatgccattggaggcaagtataaccggggtttgacggtggtagtagcattccgggagctggtggagccaaggaaacaggatgctgatagtctccagcgggcctggactgtgggctggtgtgtggaactgctgcaagctttcttcctggtggcagatgacatcatggattcatcccttacccgccggggacagatctgctggtatcagaagccgggcgtgggtttggatgccatcaatgatgctaacctcctggaagcatgtatctaccgcctgctgaagctctattgccgggagcagccctattacctgaacctgatcgagctcttcctgcagagttcctatcagactgagattgggcagaccctggacctcctcacagccccccagggcaatgtggatcttgtcagattcactgaaaagaggtacaaatctattgtcaagtacaagacagctttctactccttctaccttcctatagctgcagccatgtacatggcaggaattgatggcgagaaggagcacgccaatgccaagaagatcctgctggagatgggggagttctttcagattcaggatgattaccttgacctctttggggaccccagtgtgaccggcaaaattggcactgacatccaggacaacaaatgcagctggctggtggttcagtgtctgcaacgggccactccagaacagtaccagatcctgaaggaaaattacgggcagaaggaggctgagaaagtggcccgggtgaaggcgctatatgaggagctggatctgccagcagtgttcttgcaatatgaggaagacagttacagccacattatggctctcattgaacagtacgcagcacccctgcccccagccgtctttctggggcttgcgcgcaaaatctacaagcggagaaagtgacctagagattgcaagggcggggagaggaggctctcaataaataatcgtgtaaccttaaaaaaaaaaaaaaaaaaaaa

SEQ ID NO: 229 - DNA, 1260 bp, Unknown
  Farnesyl diphosphate synthase
  exon (1)..(1260)
atgcccctgtcccgctggttgagatctgtgggggtcttcctgctgccagccccctactgggcaccccgggagaggtggctgggttccctacggcggccctccctggtgcacgggtacccagtcctggcctggcacagtgcccgctgctggtgccaagcgtggacagaggaacctcgagccctttgctcctccctcagaatgaacggagaccagaattcagatgtttatgcccaagaaaagcaggatttcgttcagcacttctcccagatcgttagggtgctgactgaggatgagatggggcacccagagataggagatgctattgcccggctcaaggaggtcctggagtacaatgccattggaggcaagtataaccggggtttgacggtggtagtagcattccgggagctggtggagccaaggaaacaggatgctgatagtctccagcgggcctggactgtgggctggtgtgtggaactgctgcaagctttcttcctggtggcagatgacatcatggattcatcccttacccgccggggacagatctgctggtatcagaagccgggcgtgggtttggatgccatcaatgatgctaacctcctggaagcatgtatctaccgcctgctgaagctctattgccgggagcagccctattacctgaacctgatcgagctcttcctgcagagttcctatcagactgagattgggcagaccctggacctcctcacagccccccagggcaatgtggatcttgtcagattcactgaaaagaggtacaaatctattgtcaagtacaagacagctttctactccttctaccttcctatagctgcagccatgtacatggcaggaattgatggcgagaaggagcacgccaatgccaagaagatcctgctggagatgggggagttctttcagattcaggatgattaccttgacctctttggggaccccagtgtgaccggcaaaattggcactgacatccaggacaacaaatgcagctggctggtggttcagtgtctgcaacgggccactccagaacagtaccagatcctgaaggaaaattacgggcagaaggaggctgagaaagtggcccgggtgaaggcgctatatgaggagctggatctgccagcagtgttcttgcaatatgaggaagacagttacagccacattatggctctcattgaacagtacgcagcacccctgcccccagccgtctttctggggcttgcgcgcaaaatctacaagcggagaaagtga

SEQ ID NO: 230 - DNA, 1823 bp, Unknown
  56-KDa protein induced by interferon
ccagatctcagaggagcctggctaagcaaaaccctgcagaacggctgcctaatttacagcaaccatgagtacaaatggtgatgatcatcaggtcaaggatagtctggagcaattgagatgtcactttacatgggagttatccattgatgacgatgaaatgcctgatttagaaaacagagtcttggatcagattgaattcctagacaccaaatacagtgtgggaatacacaacctactagcctatgtgaaacacctgaaaggccagaatgaggaagccctgaagagcttaaaagaagctgaaaacttaatgcaggaagaacatgacaaccaagcaaatgtgaggagtctggtgacctggggcaactttgcctggatgtattaccacatgggcagactggcagaagctcagacttacctggacaaggtggagaacacttgcaagaagtttgcaaatccctccagctatagaatcgactgtcctcagatggactgtgaggaaggatgggccttgctgaaatgtggaggaaagaattataaacgggccaaggcctgctttgaaaaggctctggaagtggacccagaaaaccctgaattcagcactgggtatgcaatcaccgcctatcgcctggacggctttaaattagccacaaaaaatcacaagccattttctttgcttcccctaaggcaggctgtccgcttaaatccagacaatggatatattaaggttctccttgccctgaagcttcaggatgtaggacaagaagctgaaggagaaaagtacattgaagaagcgctgaccaacacgtcctcgcagacctatgtccttcgatatgcggccaagttttacagaaaaaaaggctctctggataaagctcttcagctctttaaaaaggccttgaaagcaacaccctcctctgccttcgtgcatcaccagatagggctttgctacagaggacaagtgattcaaatgaagaaagctgcaaactggcagcctagaggacaggatagaaaaaatgttgagagaattgcaagattagccatatctcatttggaatttgctctggaagaaaaacccacacttgatattgcttatgtagacctggcagaaatgtatatagaagcaggtgaccacagaaaagctgaagacacttatcaaaaagtgttaaccatgaaagtactcgaagaagaaaagctgcaaagggtacatttctcctatggccgatttcaggaatttcaaaataaatctgaagaccatgcaattatccattatttaaaagcagcagaaatagaaaacgcatcttttctaagagataaaagtatcaggtctttggagaaattggctttaaagaaacttcagagaaaccagtggtagaagaaacaatgcaagacatacatttctactatggtcggtttcaggaatttcaaaagaaatctgacgtcaatgcaattatccattatttaaaagctataaaaatagaacaggcatcattaacaagggataaaagtatcaattctttgaagaaattggttttaaggaaacttcggagaaaggcattagatctggaaagcttgagcctccttgggttcgtctacaaattggaaggaaatatgaatgaagccctggagtactatgagcgggccctgagactggctgctgactttgagaactctgtgagacaaggtccttaggcacccagatatcagccactttcacattttatgttaacacatactaatcatcttacctgcttgctgctttcagaacatgttatgtaatttactgtaatgatgcaatttttgaataataaatctgacaaaatatt

SEQ ID NO: 231 - DNA, 1308 bp, Unknown
  56-KDa protein induced by interferon
  exon (1)..(1308)
atgagtacaaatggtgatgatcatcaggtcaaggatagtctggagcaattgagatgtcactttacatgggagttatccattgatgacgatgaaatgcctgatttagaaaacagagtcttggatcagattgaattcctagacaccaaatacagtgtgggaatacacaacctactagcctatgtgaaacacctgaaaggccagaatgaggaagccctgaagagcttaaaagaagctgaaaacttaatgcaggaagaacatgacaaccaagcaaatgtgaggagtctggtgacctggggcaactttgcctggatgtattaccacatgggcagactggcagaagctcagacttacctggacaaggtggagaacacttgcaagaagtttgcaaatccctccagctatagaatcgactgtcctcagatggactgtgaggaaggatgggccttgctgaaatgtggaggaaagaattataaacgggccaaggcctgctttgaaaaggctctggaagtggacccagaaaaccctgaattcagcactgggtatgcaatcaccgcctatcgcctggacggctttaaattagccacaaaaaatcacaagccattttctttgcttcccctaaggcaggctgtccgcttaaatccagacaatggatatattaaggttctccttgccctgaagcttcaggatgtaggacaagaagctgaaggagaaaagtacattgaagaagcgctgaccaacacgtcctcgcagacctatgtccttcgatatgcggccaagttttacagaaaaaaaggctctctggataaagctcttcagctctttaaaaaggccttgaaagcaacaccctcctctgccttcgtgcatcaccagatagggctttgctacagaggacaagtgattcaaatgaagaaagctgcaaactggcagcctagaggacaggatagaaaaaatgttgagagaattgcaagattagccatatctcatttggaatttgctctggaagaaaaacccacacttgatattgcttatgtagacctggcagaaatgtatatagaagcaggtgaccacagaaaagctgaagacacttatcaaaaagtgttaaccatgaaagtactcgaagaagaaaagctgcaaagggtacatttctcctatggccgatttcaggaatttcaaaataaatctgaagaccatgcaattatccattatttaaaagcagcagaaatagaaaacgcatcttttctaagagataaaagtatcaggtctttggagaaattggctttaaagaaacttcagagaaaccagtggtag

SEQ ID NO: 232 - DNA, 737 bp, Unknown
  No homology
ttttctttcagtcctttaaagacgtctttccattgtcctctgtcatccattgtttctgtcgagtagtcaccataaggcttctgggttttttgttttttgaaggttatgactgtttttccctctggctgtttttaggattttcctctatatttttggttttcagcaagtgtgctacagtatgtccaggtgtgacttcttttgtatttttccctttgggatttgtactaccgtcatgcattacccaacaatggggctacatcctgagaaatgtgttgttaggtgatttcatcattgtgtgaacatcatagactgtacttatacaaacctagatggcatagtctactacacgcctaggccatatggtaccaatcttatgggaccaccatcacatatatggtccattgttgactgaaaccttgttacacagtgcatgactgcaattattaaatctgtggttggaaggtaattggtcgctgtctcttcaaatattgcttctgcctcattctttatcttgtctttgtggaacttcaaactaaccatacttttgacctttttatgtcaaaaataaaatctcctatggcttttattttttttaatattttccaccttttctctctaagtgcctcattctgtttattttcttctgacctatcttctggttcacttattatttttttctggtggtgtctaatctattggtaaactcatccattgagtttttaattatttattcttca

SEQ ID NO: 233 - DNA, 713 bp, Unknown
  No homology
atagataacctcagaaattgtcttgttgaaacctctcgtttttctagatgttcaaagtgtggaccagagagtttgagtgatgagctcaaggagacatgctgttaatggcaaagtcagatctggaacacagctgtctcgatttctggtgtattttggttctcttggcaaaaatagcacctctgtgtcttctctatccagtttcatgccttcttcatctctgttcaagtttcatgtggcctgggtgttggtgactgtgggaaacttgccttacagaaggaagaccaatctatcaccttgagtttcattgacgaaagctagaaaatcatgccaaatgagcgtcttttctcagtactcagtcctctgaccctctgtgactgtcatcctagccttttaatctctggaaatataatttatttttagcctcaaactaaatgatgagtttctggtgctaggctcaatgtagaatcccacttttgctttctttcacagaagtaaggatgcatactcaacctctgatcatcttgagaaatctgtgtcaaatgcagtgtttttcttgtgtgtcctgtggcgagaccactggtcattcattacctgttcagtttgtgggaggtggggccaggccataaagtcaagtaaaaaagaggaagaaccttcatgtaaaagggttagcttttcgttgtgtatcattggggatgtcctagctatttaaaaaa

SEQ ID NO: 234 - DNA, 3381 bp, Unknown
  Sphingosine-1-phosphate phosphatase 1
agactccggagggtagagcgctgtgccggttccgctgccgctggccaggagcgcggggacagttcggggctgcgccggaggccggcccgccttcccgggggttccgttatcatgtcgctgaggcagcgcctggcccagctggttggccgtctgcaggacccgcagaaagtggcccgtttccagcggctgtgcggggtggaagcgccgccgcgccgctcagcagaccggagggaggatgagaaagcggaggcgcctctcgccggagaccctcgactgcgagggcggcagccaggggcgcctggaggcccccagcctcccgggagcgaccgcaatcagtgcccggccaagccggacggcggcggcgcccccaacggcgtgcggaacgggctggcggccgagctgggcccggcctcgccgcggcgcgcgggcgctctgcgccgcaactcgctgacgggcgaggagggccagctggcccgcgtgagcaactggccgctctactgcctgttctgcttcggcacggagctgggcaacgaactcttctacatcctgttcttccccttctggatctggaacctggaccctctggtgggccggaggctcgtggtcatctgggtgctggtcatgtacctgggccagtgcaccaaggacatcatccgctggccgaggcccgcctcgccgcccgtggtcaagttggaggtcttctacaactctgagtacagcatgccctccacccatgccatgtccggcaccgccatccccatttctatggtcctcctcacctatggccgctggcagtaccctcttatatatggactgattcttattccctgctggtgttctctagtttgcctaagtagaatttacatgggaatgcactctattctggatattattgctggattcctatataccattttaatcttagctgtcttctatccatttgtggacctgattgacaacttcaaccaaactcacaaatatgctccattcatcatcatcgggcttcatttagctttggggatcttttctttcactcttgacacctggagcacatcccgaggagacacagccgagatactaggaagtggtgctggaattgcatgtggatctcatgttacttataacatgggtctagtattagatccttctctagatacattacctttagctgggccccccattactgtgactctgtttggaaaagccatattgcggatcctcatagggatggtatttgtactaataatcagagatgtaatgaaaaagatcaccattcctttagcctgcaaaatcttcaatataccgtgtgatgatattcgaaaagcaagacagcacatggaagttgaacttccttatcggtatattacctatggaatggttggtttctccatcacattttttgttccttacatatttttctttattggtatctcttgatggagaagtattgtttatgataagaaaggagggtatcagttactgatacccaaaaatatattccaggtaaagccaggtcagaattaggcttttgcaggaatttaacttaaataattatttaagtaaattcataagagtcagtgcattttatcattgcacatccagatactgttttaggtgagctgagctatttcgttactgagaaaatgataagtatccatttagaatgttcatgtaatgtttggagagttttgtattatggattcaacttatatataatatatataaggtacataatatgcaattgtgtatctgatatatattatatataaaataatatacctaagtgtttttttaaactatggggtgtattataaaatcaataataatatgcaaacagttgtgcctgtgtatttgaactacatacaggtatgttgttattaacagatatatttaacatttatttactatgggagccatttcctaattgaattgcgtaattactagaccagaatgcatatgctactatacattgatttactgcctgtttttacactgccattacctttcatgttatccatgatgttgaacatgggaggcatttttaatggaccaaatttttagaaaaattagtttttggatttttttttaagttctgtatactgttttgaatgaactttatttgcagctattctggatgtcagtttaataattcaggtactgaattttattgcttgctaattgtgcctttccgttgctaaattaagaaatgctatgtgtactgtgatgtaaaaataagacattaactttatcttaagttacatataatcaagcaaatattttaaaaaatgtatgtcagggtgacaggcataaaagtaaattacccttaactctttagcctttatttagaaagaaatgtggaatgggctaaactttctcaccaatttattagaaagctaaatggataaatacttccctttttgtagatatttttctgtgcattgtaagttataggagcaggacatattttttgtacattgtcttgattgtttatactgcaggtaggtatttccagtgaatggaaacgttgaaatttatagatgggacaatgcacatacttcatatgtaaacaaagcatttttctaaataatttggaaaggattggatttagcaccgttaacttttaatacccatttattggctatttaaggtaaattataaaacctaaaattagtatcagtattttagatcctattattttttcaactttctattattttcacagtggaaaatttgcgtatagtattaaactattcttttttctgtctacctttatattttgaagtgtggttgtacttacgttaatagtaagtgtatttgtagaaagtttttcataaagaagagattaactttccatataaataaataccaggtatgaaattactgattttagtgcaatatctgtatgattatccagaactatcacttcagatgtttctattttgggcaccataactatttgagctcatatttttataattctgattgagaatttaggggcatggtaatttttaccaaaactgaagctggtaattttaagtaaagcaactaaatttaccctttacttattagttaaaaggaaaccaaggcatgtaggaaaatattggtacgttggaaaatgtgaaaagagctttactttcaaaatgtatgtttaatgaattgaattttagggaccgtttcccataatttgggcctatgctatcctgttgatttttatgtctagcttaaaaggtatttgaaaatgttccatttgtgttttattattttctgtcctatgacagttctatgctaaatgtattttaaaataaaagccaaattgaagattaaaaaaaaaaaaaaaaaaaaaaaaaaaaaaaaaaaaaaaaaaaagaaaaaaaaaaaaaa

SEQ ID NO: 235 - DNA, 1326 bp, Unknown
  Sphingosine-1-phosphate phosphatase 1
  exon (1)..(1326)
atgtcgctgaggcagcgcctggcccagctggttggccgtctgcaggacccgcagaaagtggcccgtttccagcggctgtgcggggtggaagcgccgccgcgccgctcagcagaccggagggaggatgagaaagcggaggcgcctctcgccggagaccctcgactgcgagggcggcagccaggggcgcctggaggcccccagcctcccgggagcgaccgcaatcagtgcccggccaagccggacggcggcggcgcccccaacggcgtgcggaacgggctggcggccgagctgggcccggcctcgccgcggcgcgcgggcgctctgcgccgcaactcgctgacgggcgaggagggccagctggcccgcgtgagcaactggccgctctactgcctgttctgcttcggcacggagctgggcaacgaactcttctacatcctgttcttccccttctggatctggaacctggaccctctggtgggccggaggctcgtggtcatctgggtgctggtcatgtacctgggccagtgcaccaaggacatcatccgctggccgaggcccgcctcgccgcccgtggtcaagttggaggtcttctacaactctgagtacagcatgccctccacccatgccatgtccggcaccgccatccccatttctatggtcctcctcacctatggccgctggcagtaccctcttatatatggactgattcttattccctgctggtgttctctagtttgcctaagtagaatttacatgggaatgcactctattctggatattattgctggattcctatataccattttaatcttagctgtcttctatccatttgtggacctgattgacaacttcaaccaaactcacaaatatgctccattcatcatcatcgggcttcatttagctttggggatcttttctttcactcttgacacctggagcacatcccgaggagacacagccgagatactaggaagtggtgctggaattgcatgtggatctcatgttacttataacatgggtctagtattagatccttctctagatacattacctttagctgggccccccattactgtgactctgtttggaaaagccatattgcggatcctcatagggatggtatttgtactaataatcagagatgtaatgaaaaagatcaccattcctttagcctgcaaaatcttcaatataccgtgtgatgatattcgaaaagcaagacagcacatggaagttgaacttccttatcggtatattacctatggaatggttggtttctccatcacattttttgttccttacatatttttctttattggtatctcttga

SEQ ID NO: 236 - DNA, 1485 bp, Unknown
  Actin related protein 2/3 complex, subunit 1B, 41kDA
gcgcgtcgactgcccagagtccgcggccggggcgcgggaggagccaagccgccatggcctaccacagcttcctggtggagcccatcagctgccacgcctggaacaaggaccgcacccagattgccatctgccccaacaaccatgaggtgcatatctatgaaaagagcggtgccaaatggaccaaggtgcacgagctcaaggagcacaacgggcaggtgacaggcatcgactgggcccccgagagtaaccgtattgtgacctgcggcacagaccgcaacgcctacgtgtggacgctgaagggccgcacatggaagcccacgctggtcatcctgcggatcaaccgggctgcccgctgcgtgcgctgggcccccaacgagaacaagtttgctgtgggcagcggctctcgtgtgatctccatctgttatttcgagcaggagaatgactggtgggtttgcaagcacatcaagaagcccatccgctccaccgtcctcagcctggactggcaccccaacaatgtgctgctggctgccggctcctgtgacttcaagtgtcggatcttttcagcctacatcaaggaggtggaggaacggccggcacccaccccgtggggctccaagatgccctttggggaactgatgttcgaatccagcagtagctgcggctgggtacatggcgtctgtttctcagccagcgggagccgcgtggcctgggtaagccacgacagcaccgtctgcctggctgatgccgacaagaagatggccgtcgcgactctggcctctgaaacactaccactgctggcgctgaccttcatcacagacaacagcctggtggcagcgggccacgactgcttcccggtgctgttcacctatgacgccgccgcggggatgctgagcttcggcgggcggctggacgttcctaagcagagctcgcagcgtggcttgacggcccgcgagcgcttccagaacctggacaagaaggcgagctccgagggtggcacggctgcgggcgcgggcctagactcgctgcacaagaacagcgtcagccagatctcggtgctcagcggcggcaaggccaagtgctcgcagttctgcaccactggcatggatggcggcatgagtatctgggatgtgaagagcttggagtcagccttgaaggacctcaagatcaaatgacctgtgaggaatatgttgccttcatcctagctgctggggaagcggggagaggggtcagggaggctaatggttgctttgctgaatgtttctggggtaccaatacgagttcccataggggctgctccctcaaaaagggaggggacagatggggagcttttcttacctattcaaggaatacgtgcctttttcttaaatgctttcatttattgaaaaaaaaaaaaaatgcccccaaagcactatgctggtcatgaactgcttcaaaatgtggaggtaataaaatgcaactgtgtaaaaaaaaaaaaaaaaaaaaaaa

SEQ ID NO: 237 - DNA, 1080 bp, Unknown
  Actin related protein 2/3 complex subunit 1B
  exon (1)..(1080)
atggcctaccacagcttcctggtggagcccatcagctgccacgcctggaacaaggaccgcacccagattgccatctgccccaacaaccatgaggtgcatatctatgaaaagagcggtgccaaatggaccaaggtgcacgagctcaaggagcacaacgggcaggtgacaggcatcgactgggcccccgagagtaaccgtattgtgacctgcggcacagaccgcaacgcctacgtgtggacgctgaagggccgcacatggaagcccacgctggtcatcctgcggatcaaccgggctgcccgctgcgtgcgctgggcccccaacgagaacaagtttgctgtgggcagcggctctcgtgtgatctccatctgttatttcgagcaggagaatgactggtgggtttgcaagcacatcaagaagcccatccgctccaccgtcctcagcctggactggcaccccaacaatgtgctgctggctgccggctcctgtgacttcaagtgtcggatcttttcagcctacatcaaggaggtggaggaacggccggcacccaccccgtggggctccaagatgccctttggggaactgatgttcgaatccagcagtagctgcggctgggtacatggcgtctgtttctcagccagcgggagccgcgtggcctgggtaagccacgacagcaccgtctgcctggctgatgccgacaagaagatggccgtcgcgactctggcctctgaaacactaccactgctggcgctgaccttcatcacagacaacagcctggtggcagcgggccacgactgcttcccggtgctgttcacctatgacgccgccgcggggatgctgagcttcggcgggcggctggacgttcctaagcagagctcgcagcgtggcttgacggcccgcgagcgcttccagaacctggacaagaaggcgagctccgagggtggcacggctgcgggcgcgggcctagactcgctgcacaagaacagcgtcagccagatctcggtgctcagcggcggcaaggccaagtgctcgcagttctgcaccactggcatggatggcggcatgagtatctgggatgtgaag

SEQ ID NO: 238 - DNA, 493 bp, Unknown
  No homology
gcacgagcggctggggagggaggaggagctgcttaaggaaaccgcagataagttgcgttattagaaataatagaagttagtacaattctttaggagatgtaaatagcgagaatacttaagttaatgcttagcattaaatttttaaagtagtttcgataataagatcttgccgaagggaaaataatgaagactgacttgaaaagtagtttgagaaaggaggagagaagaagaaagatatttctagaatatgagggaggttaagagatgaagcttagtaatggagtgaaataattttaaatagctgaaaggactgcgaagtccgaaatcaaaacggcgttaaattgaagagcagcgttttagattaactttaaaacgtagatgacgtaaatagaacctaaacgttttagaaaatgaggttttagatgacgaaaatattttaaacgccgtctcttaaaaagattaaaggtgatttaagagcgagaccttcatgttc

SEQ ID NO: 239 - DNA, 505 bp, Unknown
  No homology
gtgaaataattttaaatagctgaaaggactgcgaagtccgaaatcaaaacggcgttaaattgaagagcagcgttttagattaactttaaaacgtagatgacgtaaatagaacctaaacgttttagaaaatgaggttttagatgacgaaaatattttaaacgccgtctcttaaaaagattaaaggtgatttaagagcgagaccttcatgttcgtggcgcaggaaaggtgatttgaagcctagttggtcttatggcattatttgctaaaaagtgatagtaattgggagtggcaggataaaaatttggagaaagaagattagaaattagaagtggaaaactcagaagacagaagtacaggaaggtgaagaaaagacttagaagataggaaaaatagaagataagacgcctctagaagacagaaactaatttcaaacccaaaaggtaggaagcagaagaaaaagtatttagacaaactaggaaaccaaagcagctaaaggaccagatag

SEQ ID NO: 240 - DNA, 843 bp, Unknown
  No homology
ggacaatatcaagcgtgctaacattcggattataggggtcccagaaggagaagagagagacaaaggggcagaaaatttatttgtcgaaataatagaggaaaattttcctcacctgaggaaggaaacagacatccaagttcaggaagcacagagagctccaaacaagagaagcccaaagaggcccacaccaagacatattataatcaaaatgtctaaaattaaagagagaatcctaaaagcagcaagagaaaggccccaagtggcatataaagggaagcccatcaggctatcatcagacttctcagccgagaccctacaggcgagaagagaatggcacgacatatttaaagtgctaaaaggaaaaaacctacaaccaagaacactctatccatcaaggttgtcattcggaatggaaggagagataaagagcttcccagacaagcaaaaattaaaggagtttatcaccaataaaccaattttgcaagaaatgctgaagggacttctttaagtgggaaagcaatgatcacaaatagaaaaaaattatcaaaaaaccccaaaacaacaacaacaaaaaacaggcaataaaatcacttgtaaggtaaaagtataataaaggcagcagatcaactacctgtgaagataatatgaaggttaaaagataaatgtactaaaatcacctatttcaatgataagagggtaatggatagacacacactaaacaaaagactatatatgatgtgaaaaacataatatgggaggaggggagtgaaaaagtagagcttttagaaagaagtgaagctaaagagtctatctactcaatttagactgttacatgcatagtgt

SEQ ID NO: 241 - DNA, 589 bp, Unknown
  No homology
  misc_feature (523)..(523): n is a, c, g, or t
  misc_feature (542)..(542): n is a, c, g, or t
ggtagcaatactaatatcagacaaaatagacttcaaatcaaaaactgtgataagagacaaagacgggcactacataatgataaagggaacaatccaacaagaaaatataacacttgcaaatatctatgcacccaacacaggagcacctaaatatataaagcaattattaacagacataagaggagaaatagacagtaacacaataatagtaggggactttaacactccacttacaccaatggatagatcatccaaacagaagatcaataaggaaacactcgcctgaaaggacacattaactagatggacttagtagatagatacagaacattccatccaaaaaccacagaatacacattctttttacatgcccatggaacattctctaggattgatcacatattaggccacaaaacaagtctcaataaatttaagaagatcaaaataataccatgcagcttttctgaccacaaaggtatgaaactggaaatcaactacagaaagaaaaccagaaaagccacanaaatgtggagattgaacanaatgctactgaacatgattgggtcaatgaagaaattaaaaaaaaaaa

SEQ ID NO: 242 - DNA, 773 bp, Unknown
  No homology
  misc_feature (685)..(685): n is a, c, g, or t
ccccaggccgccaaagcggtacttgcgcactttgctgcaccaccggccggcccctatatctttagtttttaatctctaataaaatacatgtcccctccatatggctcctaaatttttagtcaagctatgttatatgcaacagatctttatgcatgtctagtctggggaggaaatagagaagattcaaggagaaaacgctatgatgtaaaagtaagaaaataattaaaaatgcaaactaggaattagtaaacacaggaaatctgaaccagagatgatcattaaaatgcaggtaacagagcacagaggatttttagggcagtgaaacaattctgtctgatactttaacagtggacacatgtcattatacgtttgtttaagcccatagaatgcacaacaccaagagaaaaccctaatgttatctacagactttgggtgataatgatgcgtcaatgtaggttcatcaattgtaacaaatgtaccactcttgtggagaattttgataatgggggaggctctgcatgttgagggcagggggatacggaaaatagttttaccttctgctcaattttgctgtgaacctaaaattgttctaaataaaatgtattaaaaaaagaaagcaaaagatcagctattatgatcctgaatgtataaaatatgaattttagtataaaaaaaagtaagttcncctgaaaatgcacaaatgtattgagaagagttttcaacaatagtatttcaaataaatctctatgatttcaaaaaaaaaaaaaaaaaaa

SEQ ID NO: 243 - DNA, 584 bp, Unknown
  No homology
aaaacgctatgatgtaaaagtaagaaaataattaaaaatgcaaactaggaattagtaaacacaggaaatctgaaccagagatgatcattaaaatgcaggtaacagagcacagaggatttttagggcagtgaaacaattctgtctgatactttaacagtggacacatgtcattatacgtttgtttaagcccatagaatgcacaacaccaagagaaaaccctaatgttatctacagactttgggtgataatgatgcgtcaatgtaggttcatcaattgtaacaaatgtaccactcttgtggagaattttgataatgggggaggctctgcatgttgagggcagggggatacggaaaatagttttaccttctgctcaattttgctgtgaacctaaaattgttctaaataaaatgtattaaaaaaagaaagcaaaagatcagctattatgatcctgaatgtataaaatatgaattttagtataaaaaaaagtaagtcacctgaaaatgcacaaatgtattgagaagagttttcaacaatagtatttcaaataaatctctatgatttcaaaaaaaaaaaaaaaaaaaaaa

SEQ ID NO: 244 - DNA, 1155 bp, Equus caballus
gcctccaccaccgccccgaaggtcttcgcgctggcccccggctgtgggaccacatctgactccacggtggccctgggctgccttgtctccggatacttccccgagccagtgaaggtgtcctggaactcgggctccctgaccagtggcgtgcacaccttcccttccgtcctgcagtcctcagggttctactccctcagcagcatggtgaccgtgcctgccagcacctggaccagcgagacctacatctgcaacgtagtccacgcggccagcaacttcaaggtggacaagagaatcgagcccattcccgacaaccaccaaaaagtgtgcgacatgagcaagtgtcccaaatgcccagctcctgagctcctgggagggccttcggtcttcatcttccccccgaatcccaaggacaccctcatgatcacccgaacacccgaggtcacctgcgtggtggtggacgtgagccaggagaaccctgatgtcaagttcaactggtacatggacggggtggaggtgcgcacagccacgacgaggccgaaggaggagcagttcaacagcacttaccgcgtggtcagcgtcctccgcatccagcaccaggactggctgtcaggaaaggagttcaagtgtaaggtcaacaaccaagccctcccacaacccatcgagaggaccatcaccaagaccaaagggcggtcccaggagccgcaagtgtacgtcctggccccacacccagacgagctgtccaagagcaaggtcagcgtgacctgcctggtcaaggacttctacccacctgaaatcaacatcgagtggcagagtaatgggcagccagagctggagaccaagtacagcaccacccaagcccagcaggacagcgacgggtcctacttcctgtacagcaagctctccgtggacaggaacaggtggcagcagggcacgacattcacgtgtggggtgatgcacgaggctctccacaatcactacacacagaagaacgtctccaagaacccgggtaaatgagccatgggcccggcacccagcaagccatccctccttccccgtgggctctcagagtccagcgaggacacctgagcccccacccctgtgtacataccttcccgggcacccagcatgaaataaagcacccagcatgctcgtgcc

SEQ ID NO: 245 - DNA, 1014 bp, Equus caballus
  exon (1)..(1014)
gcctccaccaccgccccgaaggtcttcgcgctggcccccggctgtgggaccacatctgactccacggtggccctgggctgccttgtctccggatacttccccgagccagtgaaggtgtcctggaactcgggctccctgaccagtggcgtgcacaccttcccttccgtcctgcagtcctcagggttctactccctcagcagcatggtgaccgtgcctgccagcacctggaccagcgagacctacatctgcaacgtagtccacgcggccagcaacttcaaggtggacaagagaatcgagcccattcccgacaaccaccaaaaagtgtgcgacatgagcaagtgtcccaaatgcccagctcctgagctcctgggagggccttcggtcttcatcttccccccgaatcccaaggacaccctcatgatcacccgaacacccgaggtcacctgcgtggtggtggacgtgagccaggagaaccctgatgtcaagttcaactggtacatggacggggtggaggtgcgcacagccacgacgaggccgaaggaggagcagttcaacagcacttaccgcgtggtcagcgtcctccgcatccagcaccaggactggctgtcaggaaaggagttcaagtgtaaggtcaacaaccaagccctcccacaacccatcgagaggaccatcaccaagaccaaagggcggtcccaggagccgcaagtgtacgtcctggccccacacccagacgagctgtccaagagcaaggtcagcgtgacctgcctggtcaaggacttctacccacctgaaatcaacatcgagtggcagagtaatgggcagccagagctggagaccaagtacagcaccacccaagcccagcaggacagcgacgggtcctacttcctgtacagcaagctctccgtggacaggaacaggtggcagcagggcacgacattcacgtgtggggtgatgcacgaggctctccacaatcactacacacagaagaacgtctccaagaacccgggtaaatga

SEQ ID NO: 246 - DNA, 1773 bp, Unknown
  CDC-like kinase 1
gacgcagtcagctgcgtgattcccgtgattgcgttacaagctttgtctccttcgacttggagtctttgtccaggacgatgagacactcaaagagaacttactgtcctgattgggatgacaaggattgggattatggaaaatggaggagcagcagcagtcataaaagaaggaagagatcacatagcagtgcccaggagaacaagcgctgcaaatacaatcactctaaaatgtgtgatagccattatttggaaagcaggtctataaatgagaaagattatcatagtcgacgctacattgatgagtacagaaatgactacactcaaggatgtgaacctggacatcgccaaagagaccatgaaagccggtatcagaaccatagtagcaagtcttctggtagaagtggaagaagtagttataaaagcaaacacaggattcaccacagtacttcacatcgtcgttcacatgggaagagtcaccgaaggaaaagaaccaggagtgtagaggatgatgaggagggtcacctgatctgtcagagtggagacgtactaagtgcaagatatgaaattgttgatactttaggtgaaggagcttttggaaaagttgtggagtgcatcgatcataaagcgggaggtagacatgtagcagtaaaaatagttaaaaatgtggatagatactgtgaagctgctcgctcagaaatacaagttctggaacatctgaatacaacagaccccaacagtactttccgctgtgtccagatgttggaatggtttgagcatcatggtcacatttgcattgtttttgaactattgggacttagtacttacgacttcattaaagaaaatggttttctaccatttcgactggatcatatcagaaagatggcatatcagatatgcaagtctgtgaattttttgcacagtaataagttgactcacacagacttaaagcctgaaaacatcttatttgtgcagtctgactacacagaggcgtataatcccaaaataaaacgtgatgaacgcaccttaataaatccagatattaaagttgtagactttggtagtgcaacatatgatgacgaacatcacagtacattggtatctacaagacattatagagcacctgaagttattttagccctagggtggtcccaaccatgtgatgtctggagcataggatgcattcttattgaatactatcttgggtttaccgtatttccaacacacgatagtaaggagcatttagcaatgatggaaaggattcttggacctctaccaaaacatatgatacagaaaaccaggaaacgtaaatattttcaccacgatcgattagactgggatgaacacagttctgccggcagatatgtttcaagacgctgtaaacctctgaaggaatttatgctttctcaagatgttgaacatgagcgtctctttgacctcattcagaaaatgttggagtatgatccagccaaaagaattactctcagagaagccttaaagcatcctttctttgaccttctgaagaaaagtatatagatctgtaattggacagctctctcgaagagatcttacagactgtatcagtctaatttttaaattttaagttattttgtacagctttgtaaattcttaacatttttatattgccatgtttattttgtttgggtaatttggttctttaagtacatagctaaggtaatgaacatctttttcagtaattgtaaagtgatttattcagaataaattttttgtgcttatgaaaaaaaaaaaaaaaaaa

SEQ ID NO: 247 - DNA, 1455 bp, Unknown
  CDC-like kinase 1
  exon (1)..(1455)
atgagacactcaaagagaacttactgtcctgattgggatgacaaggattgggattatggaaaatggaggagcagcagcagtcataaaagaaggaagagatcacatagcagtgcccaggagaacaagcgctgcaaatacaatcactctaaaatgtgtgatagccattatttggaaagcaggtctataaatgagaaagattatcatagtcgacgctacattgatgagtacagaaatgactacactcaaggatgtgaacctggacatcgccaaagagaccatgaaagccggtatcagaaccatagtagcaagtcttctggtagaagtggaagaagtagttataaaagcaaacacaggattcaccacagtacttcacatcgtcgttcacatgggaagagtcaccgaaggaaaagaaccaggagtgtagaggatgatgaggagggtcacctgatctgtcagagtggagacgtactaagtgcaagatatgaaattgttgatactttaggtgaaggagcttttggaaaagttgtggagtgcatcgatcataaagcgggaggtagacatgtagcagtaaaaatagttaaaaatgtggatagatactgtgaagctgctcgctcagaaatacaagttctggaacatctgaatacaacagaccccaacagtactttccgctgtgtccagatgttggaatggtttgagcatcatggtcacatttgcattgtttttgaactattgggacttagtacttacgacttcattaaagaaaatggttttctaccatttcgactggatcatatcagaaagatggcatatcagatatgcaagtctgtgaattttttgcacagtaataagttgactcacacagacttaaagcctgaaaacatcttatttgtgcagtctgactacacagaggcgtataatcccaaaataaaacgtgatgaacgcaccttaataaatccagatattaaagttgtagactttggtagtgcaacatatgatgacgaacatcacagtacattggtatctacaagacattatagagcacctgaagttattttagccctagggtggtcccaaccatgtgatgtctggagcataggatgcattcttattgaatactatcttgggtttaccgtatttccaacacacgatagtaaggagcatttagcaatgatggaaaggattcttggacctctaccaaaacatatgatacagaaaaccaggaaacgtaaatattttcaccacgatcgattagactgggatgaacacagttctgccggcagatatgtttcaagacgctgtaaacctctgaaggaatttatgctttctcaagatgttgaacatgagcgtctctttgacctcattcagaaaatgttggagtatgatccagccaaaagaattactctcagagaagccttaaagcatcctttctttgaccttctgaagaaaagtatatag

SEQ ID NO: 248 - DNA, 876 bp, Unknown
  Arachidonate 5-lipoxygenase-activating protein
acttccccttcctgtacagggcaggttgtgcagctggaggcagagcagtcctcactgcggggagcctggagcgaacatggatcaagaaaccgtgggcaatgttgtcctgctggccatcgtcaccctcattagcgtgatccagaatgggttcttcgcccacaaggtggaacacgaaagcaagactcagaatgggcggagcttccagaggacgggaacacttgcctttgagcgggtctacactgccaaccaaaactgtgtagacgcgtaccccactttccttgtcatgctctggagcgccgggctactctgcagccaagttcctgccgcctttgctgggctgatgtacctgttcgtgaggcagaagtacttcgtgggctatctgggagagagaaggcagagcacacccggctacatatttgggaaacgcatcatactgttcctgttcctcatgtcccttgctggaatattcaactattatctcatcctctttttcggaagtgactttgaaaactacataaagacgataaccaccaccatctcccctctacttctcattccctaactctctgctgaatacagggttggtgctctcatctaatcaatacctacaagtcatcataattcagctcttgagagcattctgctcttctttagattgctgtaaatctaatgaccatctgggcttcgcgtcttgagttaaccttgcttttcctggaacaaaatgatgtcatgtcagctccgccccttgaacatgaccgtggcctcagatttgttattcagatccattctgtgtgtttcttgacttaccctgctttctgaagatattttgtgacccagatttatgttttcctaaaataaaatgcagagacatgtttt

SEQ ID NO: 249 - DNA, 486 bp, Unknown
  Arachidonate 5-lipoxygenase-activating protein
  exon (1)..(486)
atggatcaagaaaccgtgggcaatgttgtcctgctggccatcgtcaccctcattagcgtgatccagaatgggttcttcgcccacaaggtggaacacgaaagcaagactcagaatgggcggagcttccagaggacgggaacacttgcctttgagcgggtctacactgccaaccaaaactgtgtagacgcgtaccccactttccttgtcatgctctggagcgccgggctactctgcagccaagttcctgccgcctttgctgggctgatgtacctgttcgtgaggcagaagtacttcgtgggctatctgggagagagaaggcagagcacacccggctacatatttgggaaacgcatcatactgttcctgttcctcatgtcccttgctggaatattcaactattatctcatcctctttttcggaagtgactttgaaaactacataaagacgataaccaccaccatctcccctctacttctcattccctaa

SEQ ID NO: 250 - DNA, 25 bp, Artificial sequence
  Oligonucleotide sequence
acttgagaggctgcgtggtgacttc

SEQ ID NO: 251 - DNA, 25 bp, Artificial sequence
  Oligonucleotide sequence
gcccctgggagcgattcacttgaga

SEQ ID NO: 252 - DNA, 25 bp, Artificial sequence
  Oligonucleotide sequence
gaattttcatctggcagggttccga

SEQ ID NO: 253 - DNA, 25 bp, Artificial sequence
  Oligonucleotide sequence
gaacctctttgagatcatcacggcg

SEQ ID NO: 254 - DNA, 25 bp, Artificial sequence
  Oligonucleotide sequence
gaattccagcgatgatgacgtgatt

SEQ ID NO: 255 - DNA, 25 bp, Artificial sequence
  Oligonucleotide sequence
gaagaccctgcatatgtgcactaca

SEQ ID NO: 256 - DNA, 25 bp, Artificial sequence
  Oligonucleotide sequence
gttcattatttcttgcaagcggcca

SEQ ID NO: 257 - DNA, 25 bp, Artificial sequence
  Oligonucleotide sequence
ggataaactcggtccagggcctgtc

SEQ ID NO: 258 - DNA, 25 bp, Artificial sequence
  Oligonucleotide sequence
gtgacttcagtggagggcaacccag

SEQ ID NO: 259 - DNA, 25 bp, Artificial sequence
  Oligonucleotide sequence
gggcctgtccacttctggtgacaag

SEQ ID NO: 260 - DNA, 25 bp, Artificial sequence
  Oligonucleotide sequence
ggaagtgagggcacacctgcagctc

SEQ ID NO: 261 - DNA, 25 bp, Artificial sequence
  Oligonucleotide sequence
agacaggtatttccgggtggtccat

SEQ ID NO: 262 - DNA, 25 bp, Artificial sequence
  Oligonucleotide sequence
agcatcatcttcctcacggtggtgg

SEQ ID NO: 263 - DNA, 25 bp, Artificial sequence
  Oligonucleotide sequence
aatccagccggattttcctgttcaa

SEQ ID NO: 264 - DNA, 25 bp, Artificial sequence
  Oligonucleotide sequence
aatggccttgccctttggattttct

SEQ ID NO: 265 - DNA, 25 bp, Artificial sequence
  Oligonucleotide sequence
gaaaaactgctgtgtgttccgggat

SEQ ID NO: 266 - DNA, 25 bp, Artificial sequence
  Oligonucleotide sequence
gttccgggatgacttcattgccaat

SEQ ID NO: 267 - DNA, 25 bp, Artificial sequence
  Oligonucleotide sequence
ggatcatgctcttcatgctggccat

SEQ ID NO: 268 - DNA, 25 bp, Artificial sequence
  Oligonucleotide sequence
tggattttctgtttccacctcaaat

SEQ ID NO: 269 - DNA, 25 bp, Artificial sequence
  Oligonucleotide sequence
tgactttctcttgatcatctgccta

SEQ ID NO: 270 - DNA, 25 bp, Artificial sequence
  Oligonucleotide sequence
tcctgttcaacttagccgtggctga

SEQ ID NO: 271 - DNA, 25 bp, Artificial sequence
  Oligonucleotide sequence
taggtgaggagctccctaggaccag

SEQ ID NO: 272 - DNA, 25 bp, Artificial sequence
  Oligonucleotide sequence
atctccatctgctacttcgagcagg

SEQ ID NO: 273 - DNA, 25 bp, Artificial sequence
  Oligonucleotide sequence
agtgggtcaaggtgcacgagctcaa

SEQ ID NO: 274 - DNA, 25 bp, Artificial sequence
  Oligonucleotide sequence
cgagagtaaccgcattgtgacctgc

SEQ ID NO: 275 - DNA, 25 bp, Artificial sequence
  Oligonucleotide sequence
acagcttcctggtggagcccatcag

SEQ ID NO: 276 - DNA, 25 bp, Artificial sequence
  Oligonucleotide sequence
acaagttcgctgtgggcagcggctc

SEQ ID NO: 277 - DNA, 25 bp, Artificial sequence
  Oligonucleotide sequence
aaccacgaggtgcacatctatgaga

SEQ ID NO: 278 - DNA, 25 bp, Artificial sequence
  Oligonucleotide sequence
aacgggcaggtgacaggcatcgact

SEQ ID NO: 279 - DNA, 25 bp, Artificial sequence
  Oligonucleotide sequence
aaggaccgcacacagattgccatct

SEQ ID NO: 280 - DNA, 25 bp, Artificial sequence
  Oligonucleotide sequence
gcaacgcctacgtgtggacgctgaa

SEQ ID NO: 281 - DNA, 25 bp, Artificial sequence
  Oligonucleotide sequence
gtgcaaacacatcaagaagcccatt

SEQ ID NO: 282 - DNA, 25 bp, Artificial sequence
  Oligonucleotide sequence
ggacgctgaagggtcacacatggaa

SEQ ID NO: 283 - DNA, 25 bp, Artificial sequence
  Oligonucleotide sequence
tgggaggccttctctaatttggctc

SEQ ID NO: 284 - DNA, 25 bp, Artificial sequence
  Oligonucleotide sequence
aggctccataatcctgtgggttccc

SEQ ID NO: 285 - DNA, 25 bp, Artificial sequence
  Oligonucleotide sequence
atgtgatgacatcagccgacgcctg

SEQ ID NO: 286 - DNA, 25 bp, Artificial sequence
  Oligonucleotide sequence
atggctctgctggtgcaagagcttt

SEQ ID NO: 287 - DNA, 25 bp, Artificial sequence
  Oligonucleotide sequence
aggagcaccagaccgtaccaggcat

SEQ ID NO: 288 - DNA, 25 bp, Artificial sequence
  Oligonucleotide sequence
aagagctttcaagccaccgttggga

SEQ ID NO: 289 - DNA, 25 bp, Artificial sequence
  Oligonucleotide sequence
aagaggagcctgtcttcagaggaga

SEQ ID NO: 290 - DNA, 25 bp, Artificial sequence
  Oligonucleotide sequence
gcattggacgattgccgtggccaca

SEQ ID NO: 291 - DNA, 25 bp, Artificial sequence
  Oligonucleotide sequence
gaagagaaatctacagccacagctg

SEQ ID NO: 292 - DNA, 25 bp, Artificial sequence
  Oligonucleotide sequence
gggaagctgtcaacgcctgtaaaga

SEQ ID NO: 293 - DNA, 25 bp, Artificial sequence
  Oligonucleotide sequence
ttaccactttggagactgtctgccc

SEQ ID NO: 294 - DNA, 25 bp, Artificial sequence
  Oligonucleotide sequence
agtgccccgcagcgaccaggtcaga

SEQ ID NO: 295 - DNA, 25 bp, Artificial sequence
  Oligonucleotide sequence
cagcgaccaggtcagagacgccatc

SEQ ID NO: 296 - DNA, 25 bp, Artificial sequence
  Oligonucleotide sequence
gccccgcagcgaccaggtcagagac

SEQ ID NO: 297 - DNA, 25 bp, Artificial sequence
  Oligonucleotide sequence
gcagcgaccaggtcagagacgccat

SEQ ID NO: 298 - DNA, 25 bp, Artificial sequence
  Oligonucleotide sequence
gagtgccccgcagcgaccaggtcag

SEQ ID NO: 299 - DNA, 25 bp, Artificial sequence
  Oligonucleotide sequence
gtgccccgcagcgaccaggtcagag

SEQ ID NO: 300 - DNA, 25 bp, Artificial sequence
  Oligonucleotide sequence
tgccccgcagcgaccaggtcagaga

SEQ ID NO: 301 - DNA, 25 bp, Artificial sequence
  Oligonucleotide sequence
aactcagaagacagaagtacaggaa

SEQ ID NO: 302 - DNA, 25 bp, Artificial sequence
  Oligonucleotide sequence
gcgcaggaaaggtgatttgaagcct

SEQ ID NO: 303 - DNA, 25 bp, Artificial sequence
  Oligonucleotide sequence
atagtaattgggagtggcaggataa

SEQ ID NO: 304 - DNA, 25 bp, Artificial sequence
  Oligonucleotide sequence
accttcatgttcgtggcgcaggaaa

SEQ ID NO: 305 - DNA, 25 bp, Artificial sequence
  Oligonucleotide sequence
aagataagacgcctctagaagacag

SEQ ID NO: 306 - DNA, 25 bp, Artificial sequence
  Oligonucleotide sequence
cctagttggtcttatggcattattt

SEQ ID NO: 307 - DNA, 25 bp, Artificial sequence
  Oligonucleotide sequence
gacgcctctagaagacagaaactaa

SEQ ID NO: 308 - DNA, 25 bp, Artificial sequence
  Oligonucleotide sequence
gagaccttcatgttcgtggcgcagg

SEQ ID NO: 309 - DNA, 25 bp, Artificial sequence
  Oligonucleotide sequence
gtgatttgaagcctagttggtctta

SEQ ID NO: 310 - DNA, 25 bp, Artificial sequence
  Oligonucleotide sequence
ggtcttatggcattatttgctaaaa

SEQ ID NO: 311 - DNA, 25 bp, Artificial sequence
  Oligonucleotide sequence
ttcaaacccaaaaggtaggaagcag

SEQ ID NO: 312 - DNA, 25 bp, Artificial sequence
  Oligonucleotide sequence
atatcatggaggacctggataccaa

SEQ ID NO: 313 - DNA, 25 bp, Artificial sequence
  Oligonucleotide sequence
atcatcaatgtcttccaccagtact

SEQ ID NO: 314 - DNA, 25 bp, Artificial sequence
  Oligonucleotide sequence
acggccacagccactaatctggagg

SEQ ID NO: 315 - DNA, 25 bp, Artificial sequence
  Oligonucleotide sequence
caagcagctgagtttcgaggagttc

SEQ ID NO: 316 - DNA, 25 bp, Artificial sequence
  Oligonucleotide sequence
gagctggcgaacttcctcaagagta

SEQ ID NO: 317 - DNA, 25 bp, Artificial sequence
  Oligonucleotide sequence
gatgcacgagcatgaccaaggccac

SEQ ID NO: 318 - DNA, 25 bp, Artificial sequence
  Oligonucleotide sequence
gaggagttcatcatcctggtggcca

SEQ ID NO: 319 - DNA, 25 bp, Artificial sequence
  Oligonucleotide sequence
ggaactgtcccagatggagcgcgac

SEQ ID NO: 320 - DNA, 25 bp, Artificial sequence
  Oligonucleotide sequence
ggagagtggccatggtcacagccat

SEQ ID NO: 321 - DNA, 25 bp, Artificial sequence
  Oligonucleotide sequence
ggagcgcgacatagagaccatcatc

SEQ ID NO: 322 - DNA, 25 bp, Artificial sequence
  Oligonucleotide sequence
tgacgcatgcctcccatgagaagat

SEQ ID NO: 323 - DNA, 25 bp, Artificial sequence
  Oligonucleotide sequence
aggacgtgacctacgcccaggtgaa

SEQ ID NO: 324 - DNA, 25 bp, Artificial sequence
  Oligonucleotide sequence
agggaccccagaagacataggagct

SEQ ID NO: 325 - DNA, 25 bp, Artificial sequence
  Oligonucleotide sequence
aggtgaaccacttgaccctcagagg

SEQ ID NO: 326 - DNA, 25 bp, Artificial sequence
  Oligonucleotide sequence
agtggtacgctgctatggccatcca

SEQ ID NO: 327 - DNA, 25 bp, Artificial sequence
  Oligonucleotide sequence
agcagagcccagtggtacgctgcta

SEQ ID NO: 328 - DNA, 25 bp, Artificial sequence
  Oligonucleotide sequence
cataggagctgcctccagaggacac

SEQ ID NO: 329 - DNA, 25 bp, Artificial sequence
  Oligonucleotide sequence
gagactgcagggaccccagaagaca

SEQ ID NO: 330 - DNA, 25 bp, Artificial sequence
  Oligonucleotide sequence
gatgccaccctccatggagggagac

SEQ ID NO: 331 - DNA, 25 bp, Artificial sequence
  Oligonucleotide sequence
gtatgcacaggctgctatatctgaa

SEQ ID NO: 332 - DNA, 25 bp, Artificial sequence
  Oligonucleotide sequence
tggccatccactagcccaggaagga

SEQ ID NO: 333 - DNA, 25 bp, Artificial sequence
  Oligonucleotide sequence
tagcccaggaaggacccggatgcca

SEQ ID NO: 334 - DNA, 25 bp, Artificial sequence
  Oligonucleotide sequence
agattgttgcctgtcctaaccagga

SEQ ID NO: 335 - DNA, 25 bp, Artificial sequence
  Oligonucleotide sequence
gcattatcgttacaccgagtgcatt

SEQ ID NO: 336 - DNA, 25 bp, Artificial sequence
  Oligonucleotide sequence
cgtgactttggttccttcgacaaat

SEQ ID NO: 337 - DNA, 25 bp, Artificial sequence
  Oligonucleotide sequence
gcagcctgcactcaagttcaatggt

SEQ ID NO: 338 - DNA, 25 bp, Artificial sequence
  Oligonucleotide sequence
gaagttgactgctgtatcggctggt

SEQ ID NO: 339 - DNA, 25 bp, Artificial sequence
  Oligonucleotide sequence
taaggaccagggacgcctccagatt

SEQ ID NO: 340 - DNA, 25 bp, Artificial sequence
  Oligonucleotide sequence
ggaggccatatcaatcataccattt

SEQ ID NO: 341 - DNA, 25 bp, Artificial sequence
  Oligonucleotide sequence
ggaacaacaggtcttattcccctgc

SEQ ID NO: 342 - DNA, 25 bp, Artificial sequence
  Oligonucleotide sequence
ggagcacgcttattaccttcagtat

SEQ ID NO: 343 - DNA, 25 bp, Artificial sequence
  Oligonucleotide sequence
ttgctggacgccatcaaacgtgact

SEQ ID NO: 344 - DNA, 25 bp, Artificial sequence
  Oligonucleotide sequence
ttttctggacaaacctgagccccaa

SEQ ID NO: 345 - DNA, 25 bp, Artificial sequence
  Oligonucleotide sequence
atatgaggagctgaacctgccggct

SEQ ID NO: 346 - DNA, 25 bp, Artificial sequence
  Oligonucleotide sequence
gggctcatcgagcagtacgctacgc

SEQ ID NO: 347 - DNA, 25 bp, Artificial sequence
  Oligonucleotide sequence
aggaagacagttacagccgccttat

SEQ ID NO: 348 - DNA, 25 bp, Artificial sequence
  Oligonucleotide sequence
aacagcgccagatcctgcaggagaa

SEQ ID NO: 349 - DNA, 25 bp, Artificial sequence
  Oligonucleotide sequence
caagacagctttctattccttctac

SEQ ID NO: 350 - DNA, 25 bp, Artificial sequence
  Oligonucleotide sequence
ctggctggtggttcagtgtctgcaa

SEQ ID NO: 351 - DNA, 25 bp, Artificial sequence
  Oligonucleotide sequence
gacgggcaagattggcactgacatc

SEQ ID NO: 352 - DNA, 25 bp, Artificial sequence
  Oligonucleotide sequence
gggcgagttctttcagattcaggac

SEQ ID NO: 353 - DNA, 25 bp, Artificial sequence
  Oligonucleotide sequence
ggacgattaccttgatctctttggg

SEQ ID NO: 354 - DNA, 25 bp, Artificial sequence
  Oligonucleotide sequence
tgccggctgtgttcctgcagtatga

SEQ ID NO: 355 - DNA, 25 bp, Artificial sequence
  Oligonucleotide sequence
ttcctgtagctgctgccatgtacat

SEQ ID NO: 356 - DNA, 25 bp, Artificial sequence
  Oligonucleotide sequence
agagctggagcccttgaccaacgga

SEQ ID NO: 357 - DNA, 25 bp, Artificial sequence
  Oligonucleotide sequence
agaaaaccaggttctccagctcgag

SEQ ID NO: 358 - DNA, 25 bp, Artificial sequence
  Oligonucleotide sequence
acggcgtggtcagcaagtcttgttt

SEQ ID NO: 359 - DNA, 25 bp, Artificial sequence
  Oligonucleotide sequence
aagaccgggccctatagcatgttct

SEQ ID NO: 360 - DNA, 25 bp, Artificial sequence
  Oligonucleotide sequence
gaagtactccgcgaacagacacaag

SEQ ID NO: 361 - DNA, 25 bp, Artificial sequence
  Oligonucleotide sequence
gacaacaggttcgatctgcggccat

SEQ ID NO: 362 - DNA, 25 bp, Artificial sequence
  Oligonucleotide sequence
gaccaacggacaggtgtcgcagact

SEQ ID NO: 363 - DNA, 25 bp, Artificial sequence
  Oligonucleotide sequence
tgaagcggtttttctcgaagtactc

SEQ ID NO: 364 - DNA, 25 bp, Artificial sequence
  Oligonucleotide sequence
gtggcagttccggtgcatagaaaac

SEQ ID NO: 365 - DNA, 25 bp, Artificial sequence
  Oligonucleotide sequence
ggatgacgtacgcagagctctccgt

SEQ ID NO: 366 - DNA, 25 bp, Artificial sequence
  Oligonucleotide sequence
tatagcatgttctgcagactcctca

SEQ ID NO: 367 - DNA, 25 bp, Artificial sequence
  Oligonucleotide sequence
atatgggccccggtatgcagtgcaa

SEQ ID NO: 368 - DNA, 25 bp, Artificial sequence
  Oligonucleotide sequence
cgtggcaaccgcaagtctttgaggc

SEQ ID NO: 369 - DNA, 25 bp, Artificial sequence
  Oligonucleotide sequence
agaggcatggtccagaacagctccc

SEQ ID NO: 370 - DNA, 25 bp, Artificial sequence
  Oligonucleotide sequence
agaagaatccccaggctccagttta

SEQ ID NO: 371 - DNA, 25 bp, Artificial sequence
  Oligonucleotide sequence
aagcctgaggacaccacacatggtc

SEQ ID NO: 372 - DNA, 25 bp, Artificial sequence
  Oligonucleotide sequence
tccagtttacccagtgacacttcag

SEQ ID NO: 373 - DNA, 25 bp, Artificial sequence
  Oligonucleotide sequence
gctgcctccaggacatctatatggg

SEQ ID NO: 374 - DNA, 25 bp, Artificial sequence
  Oligonucleotide sequence
gcatgaagattctgctcaccagcaa

SEQ ID NO: 375 - DNA, 25 bp, Artificial sequence
  Oligonucleotide sequence
gactgagcaagggttctgacctgga

SEQ ID NO: 376 - DNA, 25 bp, Artificial sequence
  Oligonucleotide sequence
gagatcatggacctgctagtgcagt

SEQ ID NO: 377 - DNA, 25 bp, Artificial sequence
  Oligonucleotide sequence
ttagctgctcgagaacgcaagcgtt

SEQ ID NO: 378 - DNA, 25 bp, Artificial sequence
  Oligonucleotide sequence
ccgttcgcgtgcacccagggaggac

SEQ ID NO: 379 - DNA, 25 bp, Artificial sequence
  Oligonucleotide sequence
gtcgccgtggtcacccacaggaagg

SEQ ID NO: 380 - DNA, 25 bp, Artificial sequence
  Oligonucleotide sequence
cagcctgggttttctcgggcggctc

SEQ ID NO: 381 - DNA, 25 bp, Artificial sequence
  Oligonucleotide sequence
cattttcttctggtcgccgtggtca

SEQ ID NO: 382 - DNA, 25 bp, Artificial sequence
  Oligonucleotide sequence
caggtctcagcctgtgaggactgcg

SEQ ID NO: 383 - DNA, 25 bp, Artificial sequence
  Oligonucleotide sequence
gactgcggcgagtctggagacccca

SEQ ID NO: 384 - DNA, 25 bp, Artificial sequence
  Oligonucleotide sequence
gagggccatctgctgacagagcaac

SEQ ID NO: 385 - DNA, 25 bp, Artificial sequence
  Oligonucleotide sequence
gtgtggacccacgagggccatctgc

SEQ ID NO: 386 - DNA, 25 bp, Artificial sequence
  Oligonucleotide sequence
gtgggctctgtctggttcacagagc

SEQ ID NO: 387 - DNA, 25 bp, Artificial sequence
  Oligonucleotide sequence
tgcacccagggaggactcggagtcc

SEQ ID NO: 388 - DNA, 25 bp, Artificial sequence
  Oligonucleotide sequence
tcttcgggactgtgtggacccacga

SEQ ID NO: 389 - DNA, 25 bp, Artificial sequence
  Oligonucleotide sequence
aggttgcttggctgactatgttgaa

SEQ ID NO: 390 - DNA, 25 bp, Artificial sequence
  Oligonucleotide sequence
actcaagtatggtcagcgtattcac

SEQ ID NO: 391 - DNA, 25 bp, Artificial sequence
  Oligonucleotide sequence
aatgcggtggcatctttacagatac

SEQ ID NO: 392 - DNA, 25 bp, Artificial sequence
  Oligonucleotide sequence
ctaagcgatgcttcggtgaccgcag

SEQ ID NO: 393 - DNA, 25 bp, Artificial sequence
  Oligonucleotide sequence
gcgtattcacctgagttttctggac

SEQ ID NO: 394 - DNA, 25 bp, Artificial sequence
  Oligonucleotide sequence
gaacccctttgatctcagttttgta

SEQ ID NO: 395 - DNA, 25 bp, Artificial sequence
  Oligonucleotide sequence
gtgaccgcaggaggtttccaaatca

SEQ ID NO: 396 - DNA, 25 bp, Artificial sequence
  Oligonucleotide sequence
ttttaaatctccaggcttcccaaat

SEQ ID NO: 397 - DNA, 25 bp, Artificial sequence
  Oligonucleotide sequence
taaccaagtctgctactggcacatc

SEQ ID NO: 398 - DNA, 25 bp, Artificial sequence
  Oligonucleotide sequence
tacaagcactacttctacgggaaat

SEQ ID NO: 399 - DNA, 25 bp, Artificial sequence
  Oligonucleotide sequence
tatggttgtctcttttggaacccct

SEQ ID NO: 400 - DNA, 25 bp, Artificial sequence
  Oligonucleotide sequence
agggctttaggctgttctttcccat

SEQ ID NO: 401 - DNA, 25 bp, Artificial sequence
  Oligonucleotide sequence
aggaggaggcatccatcaacctcaa

SEQ ID NO: 402 - DNA, 25 bp, Artificial sequence
  Oligonucleotide sequence
agtggaggtattctaaggctgcccc

SEQ ID NO: 403 - DNA, 25 bp, Artificial sequence
  Oligonucleotide sequence
aaatacaccccaagtggtcacgctg

SEQ ID NO: 404 - DNA, 25 bp, Artificial sequence
  Oligonucleotide sequence
tgaagcccaatatggtaaccccagg

SEQ ID NO: 405 - DNA, 25 bp, Artificial sequence
  Oligonucleotide sequence
gattgccatggcaactgtcacggca

SEQ ID NO: 406 - DNA, 25 bp, Artificial sequence
  Oligonucleotide sequence
gtctgtggtattgtctgtgtatgct

SEQ ID NO: 407 - DNA, 25 bp, Artificial sequence
  Oligonucleotide sequence
ggaatatgtcaagcgagccctggcc

SEQ ID NO: 408 - DNA, 25 bp, Artificial sequence
  Oligonucleotide sequence
tgggatcaccttcctatctggaggc

SEQ ID NO: 409 - DNA, 25 bp, Artificial sequence
  Oligonucleotide sequence
ttgcctccctggtgacattggtctg

SEQ ID NO: 410 - DNA, 25 bp, Artificial sequence
  Oligonucleotide sequence
ttcatctctaaccatgcctactaag

SEQ ID NO: 411 - DNA, 25 bp, Artificial sequence
  Oligonucleotide sequence
atgatgactgcaccccacggaggag

SEQ ID NO: 412 - DNA, 25 bp, Artificial sequence
  Oligonucleotide sequence
aggccctacggctatgcctggcagg

SEQ ID NO: 413 - DNA, 25 bp, Artificial sequence
  Oligonucleotide sequence
aggagttgctctgaaacctaccgca

SEQ ID NO: 414 - DNA, 25 bp, Artificial sequence
  Oligonucleotide sequence
agatctgcaaggtggcagtggccac

SEQ ID NO: 415 - DNA, 25 bp, Artificial sequence
  Oligonucleotide sequence
accccacggaggagttgctctgaaa

SEQ ID NO: 416 - DNA, 25 bp, Artificial sequence
  Oligonucleotide sequence
cacggtgaaggtggtcattatcccc

SEQ ID NO: 417 - DNA, 25 bp, Artificial sequence
  Oligonucleotide sequence
aacctaccgcatgccagtgatggaa

SEQ ID NO: 418 - DNA, 25 bp, Artificial sequence
  Oligonucleotide sequence
ctgctgagaacatccgtcacggtga

SEQ ID NO: 419 - DNA, 25 bp, Artificial sequence
  Oligonucleotide sequence
gattgatctgctgagaacatccgtc

SEQ ID NO: 420 - DNA, 25 bp, Artificial sequence
  Oligonucleotide sequence
ggcagtggccactctgagccatgag

SEQ ID NO: 421 - DNA, 25 bp, Artificial sequence
  Oligonucleotide sequence
tgagccatgagcagatgattgatct

SEQ ID NO: 422 - DNA, 25 bp, Artificial sequence
  Oligonucleotide sequence
accacttcatgttctctacagagct

SEQ ID NO: 423 - DNA, 25 bp, Artificial sequence
  Oligonucleotide sequence
acagagctgtccagagccgaggctg

SEQ ID NO: 424 - DNA, 25 bp, Artificial sequence
  Oligonucleotide sequence
aaacgagtccgagggcacagccagg

SEQ ID NO: 425 - DNA, 25 bp, Artificial sequence
  Oligonucleotide sequence
cgttgcccgctgttggtcatgacaa

SEQ ID NO: 426 - DNA, 25 bp, Artificial sequence
  Oligonucleotide sequence
gagtctctgtcaggatccttttgaa

SEQ ID NO: 427 - DNA, 25 bp, Artificial sequence
  Oligonucleotide sequence
gagtcacccaaggaacttatgcaga

SEQ ID NO: 428 - DNA, 25 bp, Artificial sequence
  Oligonucleotide sequence
gtcctgtggcttttgtgtgtctctc

SEQ ID NO: 429 - DNA, 25 bp, Artificial sequence
  Oligonucleotide sequence
ggccttgcttgagagaggtccatcc

SEQ ID NO: 430 - DNA, 25 bp, Artificial sequence
  Oligonucleotide sequence
ggtcacttagcagcgacttcttgga

SEQ ID NO: 431 - DNA, 25 bp, Artificial sequence
  Oligonucleotide sequence
ggagccaggtgtctgcatttgaaca

SEQ ID NO: 432 - DNA, 25 bp, Artificial sequence
  Oligonucleotide sequence
ttatgcagatgccatgtcctcactc

SEQ ID NO: 433 - DNA, 25 bp, Artificial sequence
  Oligonucleotide sequence
acctagacgacctctcgggattgac

SEQ ID NO: 434 - DNA, 25 bp, Artificial sequence
  Oligonucleotide sequence
cgattccgttatgcggtccaagcaa

SEQ ID NO: 435 - DNA, 25 bp, Artificial sequence
  Oligonucleotide sequence
tgaacgggaccagccaaacgacggg

SEQ ID NO: 436 - DNA, 25 bp, Artificial sequence
  Oligonucleotide sequence
agaacttctcatgcttcatctacat

SEQ ID NO: 437 - DNA, 25 bp, Artificial sequence
  Oligonucleotide sequence
gaccgtgatggtcaacaccagccaa

SEQ ID NO: 438 - DNA, 25 bp, Artificial sequence
  Oligonucleotide sequence
gacgacgtccagtatttcctgtata

SEQ ID NO: 439 - DNA, 25 bp, Artificial sequence
  Oligonucleotide sequence
gggatccagttcttcgattccgtta

SEQ ID NO: 440 - DNA, 25 bp, Artificial sequence
  Oligonucleotide sequence
ggaatgtccccgttacatgagcgac

SEQ ID NO: 441 - DNA, 25 bp, Artificial sequence
  Oligonucleotide sequence
tctacatcgtgcacttcatgatctg

SEQ ID NO: 442 - DNA, 25 bp, Artificial sequence
  Oligonucleotide sequence
tttcggagaagctcgtctacaccaa

SEQ ID NO: 443 - DNA, 25 bp, Artificial sequence
  Oligonucleotide sequence
ttgacctcttacaattacttcgtgg

SEQ ID NO: 444 - DNA, 25 bp, Artificial sequence
  Oligonucleotide sequence
acgccaatgggtcaaactaactctg

SEQ ID NO: 445 - DNA, 25 bp, Artificial sequence
  Oligonucleotide sequence
agaagtcctctctgagactcaaggg

SEQ ID NO: 446 - DNA, 25 bp, Artificial sequence
  Oligonucleotide sequence
aaagcccatgagctgcttctttgtt

SEQ ID NO: 447 - DNA, 25 bp, Artificial sequence
  Oligonucleotide sequence
aaaaatctctcatcctattctgctt

SEQ ID NO: 448 - DNA, 25 bp, Artificial sequence
  Oligonucleotide sequence
aagccttcctaaaagcacacttgcc

SEQ ID NO: 449 - DNA, 25 bp, Artificial sequence
  Oligonucleotide sequence
aagggctaaggcaaggtcttccaga

SEQ ID NO: 450 - DNA, 25 bp, Artificial sequence
  Oligonucleotide sequence
caagaaatgacagcctccaagcctt

SEQ ID NO: 451 - DNA, 25 bp, Artificial sequence
  Oligonucleotide sequence
gaagcttcttcccacctagaaagaa

SEQ ID NO: 452 - DNA, 25 bp, Artificial sequence
  Oligonucleotide sequence
ggtgacaacgctggctgctgaaagc

SEQ ID NO: 453 - DNA, 25 bp, Artificial sequence
  Oligonucleotide sequence
tttccactgtcgtcagagccaacaa

SEQ ID NO: 454 - DNA, 25 bp, Artificial sequence
  Oligonucleotide sequence
ttctttgttctctgtcacgggacaa

SEQ ID NO: 455 - DNA, 25 bp, Artificial sequence
  Oligonucleotide sequence
cgggcgactcgcagaatcaatacat

SEQ ID NO: 456 - DNA, 25 bp, Artificial sequence
  Oligonucleotide sequence
acagagccccggtcagcgggtgaaa

SEQ ID NO: 457 - DNA, 25 bp, Artificial sequence
  Oligonucleotide sequence
aactgaacgataaccatccgaccga

SEQ ID NO: 458 - DNA, 25 bp, Artificial sequence
  Oligonucleotide sequence
aatcaatacattttcccgagtctgg

SEQ ID NO: 459 - DNA, 25 bp, Artificial sequence
  Oligonucleotide sequence
tcggctgcctggtgaagaggttcct

SEQ ID NO: 460 - DNA, 25 bp, Artificial sequence
  Oligonucleotide sequence
gcgtttctgcagctatttttctact

SEQ ID NO: 461 - DNA, 25 bp, Artificial sequence
  Oligonucleotide sequence
ggtcccgcgcatcaaagacaaactg

SEQ ID NO: 462 - DNA, 25 bp, Artificial sequence
  Oligonucleotide sequence
gcgacttccagtacgagctggtcat

SEQ ID NO: 463 - DNA, 25 bp, Artificial sequence
  Oligonucleotide sequence
gaagaggttcctccggagacacagt

SEQ ID NO: 464 - DNA, 25 bp, Artificial sequence
  Oligonucleotide sequence
ggagacacagtctgttccagccggt

SEQ ID NO: 465 - DNA, 25 bp, Artificial sequence
  Oligonucleotide sequence
tgaagtttggccaagaggcttcccg

SEQ ID NO: 466 - DNA, 25 bp, Artificial sequence
  Oligonucleotide sequence
atctacatccatctggcagttgtgc

SEQ ID NO: 467 - DNA, 25 bp, Artificial sequence
  Oligonucleotide sequence
atgaggatgacctctgatctccatc

SEQ ID NO: 468 - DNA, 25 bp, Artificial sequence
  Oligonucleotide sequence
agcattgtcattcctgtggcgtgcg

SEQ ID NO: 469 - DNA, 25 bp, Artificial sequence
  Oligonucleotide sequence
acaaaggttatttctgaggctcagg

SEQ ID NO: 470 - DNA, 25 bp, Artificial sequence
  Oligonucleotide sequence
ctcgtgactaagagcctggtcctta

SEQ ID NO: 471 - DNA, 25 bp, Artificial sequence
  Oligonucleotide sequence
ccctcatttcactgatgaccgtggg

SEQ ID NO: 472 - DNA, 25 bp, Artificial sequence
  Oligonucleotide sequence
gaagtcatttggatcctaggcccat

SEQ ID NO: 473 - DNA, 25 bp, Artificial sequence
  Oligonucleotide sequence
tggcgtgcgcactcgtgactaagag

SEQ ID NO: 474 - DNA, 25 bp, Artificial sequence
  Oligonucleotide sequence
ggcagcgacatgagttggatccgtt

SEQ ID NO: 475 - DNA, 25 bp, Artificial sequence
  Oligonucleotide sequence
taaaagagcagacacggccccaaac

SEQ ID NO: 476 - DNA, 25 bp, Artificial sequence
  Oligonucleotide sequence
ttactgtcctgtttgctgtcacaca

SEQ ID NO: 477 - DNA, 25 bp, Artificial sequence
  Oligonucleotide sequence
accacagtccagagcagttccaggg

SEQ ID NO: 478 - DNA, 25 bp, Artificial sequence
  Oligonucleotide sequence
aggactaccagcgtgccttggaaac

SEQ ID NO: 479 - DNA, 25 bp, Artificial sequence
  Oligonucleotide sequence
aaggccagaggagccagagccaagt

SEQ ID NO: 480 - DNA, 25 bp, Artificial sequence
  Oligonucleotide sequence
caagcagattctcaccatgggataa

SEQ ID NO: 481 - DNA, 25 bp, Artificial sequence
  Oligonucleotide sequence
gatcagcaggactggtttcgggccc

SEQ ID NO: 482 - DNA, 25 bp, Artificial sequence
  Oligonucleotide sequence
gaaactgcgatgcagcccttcgtgt

SEQ ID NO: 483 - DNA, 25 bp, Artificial sequence
  Oligonucleotide sequence
gaagccagccaaggcttttcccagg

SEQ ID NO: 484 - DNA, 25 bp, Artificial sequence
  Oligonucleotide sequence
ggcttttggttgtcccagtggaaga

SEQ ID NO: 485 - DNA, 25 bp, Artificial sequence
  Oligonucleotide sequence
tgatcctcacgctgtgcgatctcat

SEQ ID NO: 486 - DNA, 25 bp, Artificial sequence
  Oligonucleotide sequence
tcactgtcacttccaaccagaagaa

SEQ ID NO: 487 - DNA, 25 bp, Artificial sequence
  Oligonucleotide sequence
ttcgtgtcttccaagcagattctca

SEQ ID NO: 488 - DNA, 25 bp, Artificial sequence
  Oligonucleotide sequence
aggaatccctatctggaccctgaag

SEQ ID NO: 489 - DNA, 25 bp, Artificial sequence
  Oligonucleotide sequence
agcaagaccagaactccggcgtggt

SEQ ID NO: 490 - DNA, 25 bp, Artificial sequence
  Oligonucleotide sequence
agcgcactgagttctctcaacttgt

SEQ ID NO: 491 - DNA, 25 bp, Artificial sequence
  Oligonucleotide sequence
aacaggctcaacaaggcgccgcgag

SEQ ID NO: 492 - DNA, 25 bp, Artificial sequence
  Oligonucleotide sequence
caacttgtccttcgctgggctggag

SEQ ID NO: 493 - DNA, 25 bp, Artificial sequence
  Oligonucleotide sequence
gcctaaaggactaccgggcaagctt

SEQ ID NO: 494 - DNA, 25 bp, Artificial sequence
  Oligonucleotide sequence
gcctcattaggacgtcttaaccaac

SEQ ID NO: 495 - DNA, 25 bp, Artificial sequence
  Oligonucleotide sequence
gctgcccgtggtgagtaatctgata

SEQ ID NO: 496 - DNA, 25 bp, Artificial sequence
  Oligonucleotide sequence
gaattgactcagattgccctggctc

SEQ ID NO: 497 - DNA, 25 bp, Artificial sequence
  Oligonucleotide sequence
gaccctgaagcgtccaagcagcaag

SEQ ID NO: 498 - DNA, 25 bp, Artificial sequence
  Oligonucleotide sequence
ttagcgtgcttgatctcagctgcaa

SEQ ID NO: 499 - DNA, 25 bp, Artificial sequence
  Oligonucleotide sequence
aggaacaggtgagccgtgccaacca

SEQ ID NO: 500 - DNA, 25 bp, Artificial sequence
  Oligonucleotide sequence
aactgaagggactgtcgtctctttc

SEQ ID NO: 501 - DNA, 25 bp, Artificial sequence
  Oligonucleotide sequence
aatcagcggctggaggttgactaca

SEQ ID NO: 502 - DNA, 25 bp, Artificial sequence
  Oligonucleotide sequence
gcatagatcacaccttctctaggga

SEQ ID NO: 503 - DNA, 25 bp, Artificial sequence
  Oligonucleotide sequence
gactacagcattgggcgggacatcc

SEQ ID NO: 504 - DNA, 25 bp, Artificial sequence
  Oligonucleotide sequence
gttacaacagcagcagcagccgcag

SEQ ID NO: 505 - DNA, 25 bp, Artificial sequence
  Oligonucleotide sequence
ggaccctgagcaacacctgactgag

SEQ ID NO: 506 - DNA, 25 bp, Artificial sequence
  Oligonucleotide sequence
taatcctaggttcatgacccttcac

SEQ ID NO: 507 - DNA, 25 bp, Artificial sequence
  Oligonucleotide sequence
tgagggaaccagctcctggcactaa

SEQ ID NO: 508 - DNA, 25 bp, Artificial sequence
  Oligonucleotide sequence
tgcccgaaccctgcaagagtggtgt

SEQ ID NO: 509 - DNA, 25 bp, Artificial sequence
  Oligonucleotide sequence
tttaggagtcctcagagagccttcc

SEQ ID NO: 510 - DNA, 25 bp, Artificial sequence
  Oligonucleotide sequence
atggtcgccaactggaacgtctggt

SEQ ID NO: 511 - DNA, 25 bp, Artificial sequence
  Oligonucleotide sequence
aggcaggatgcccagtggccaatac

SEQ ID NO: 512 - DNA, 25 bp, Artificial sequence
  Oligonucleotide sequence
agggcacccagcatggttgagtctg

SEQ ID NO: 513 - DNA, 25 bp, Artificial sequence
  Oligonucleotide sequence
agtgcaggttgcctgtggcatccat

SEQ ID NO: 514 - DNA, 25 bp, Artificial sequence
  Oligonucleotide sequence
agctcagggccttgtagtgcaggtt

SEQ ID NO: 515 - DNA, 25 bp, Artificial sequence
  Oligonucleotide sequence
catgtttattattaccccgtggcgg

SEQ ID NO: 516 - DNA, 25 bp, Artificial sequence
  Oligonucleotide sequence
ctgtgggttcaggttcatgtttatt

SEQ ID NO: 517 - DNA, 25 bp, Artificial sequence
  Oligonucleotide sequence
gaaggccttccttgaaggagcccat

SEQ ID NO: 518 - DNA, 25 bp, Artificial sequence
  Oligonucleotide sequence
ggaggaacccacaggcagatgctca

SEQ ID NO: 519 - DNA, 25 bp, Artificial sequence
  Oligonucleotide sequence
tgtgcggacaagcagccactgatca

SEQ ID NO: 520 - DNA, 25 bp, Artificial sequence
  Oligonucleotide sequence
tcaacctctgctgaccactgagtga

SEQ ID NO: 521 - DNA, 25 bp, Artificial sequence
  Oligonucleotide sequence
aggctctgcaggactggatatcccg

SEQ ID NO: 522 - DNA, 25 bp, Artificial sequence
  Oligonucleotide sequence
atggctgtcttcatgacctggagta

SEQ ID NO: 523 - DNA, 25 bp, Artificial sequence
  Oligonucleotide sequence
gctcacaggctgcagacggttcaga

SEQ ID NO: 524 - DNA, 25 bp, Artificial sequence
  Oligonucleotide sequence
gaacggtgctggtgatcgctcacag

SEQ ID NO: 525 - DNA, 25 bp, Artificial sequence
  Oligonucleotide sequence
gatttggaccttgtgtgctttcatt

SEQ ID NO: 526 - DNA, 25 bp, Artificial sequence
  Oligonucleotide sequence
gtgtccatgaaccttatttccttga

SEQ ID NO: 527 - DNA, 25 bp, Artificial sequence
  Oligonucleotide sequence
ggagtagctcctgctttgagtttcc

SEQ ID NO: 528 - DNA, 25 bp, Artificial sequence
  Oligonucleotide sequence
tggacgtccagtgtgagcaggctct

SEQ ID NO: 529 - DNA, 25 bp, Artificial sequence
  Oligonucleotide sequence
tggatcatgcccagctcatggaggg

SEQ ID NO: 530 - DNA, 25 bp, Artificial sequence
  Oligonucleotide sequence
tggatgaagccaccagtgccctgga

SEQ ID NO: 531 - DNA, 25 bp, Artificial sequence
  Oligonucleotide sequence
ttcagaacgctgaccagatcctggt

SEQ ID NO: 532 - DNA, 25 bp, Artificial sequence
  Oligonucleotide sequence
aggagcctccggagtccagcggcct

SEQ ID NO: 533 - DNA, 25 bp, Artificial sequence
  Oligonucleotide sequence
agctttttaactagcctggagcctt

SEQ ID NO: 534 - DNA, 25 bp, Artificial sequence
  Oligonucleotide sequence
cgtcagagcttctgcctgagcctct

SEQ ID NO: 535 - DNA, 25 bp, Artificial sequence
  Oligonucleotide sequence
ctgcagccactagagatagcttttt

SEQ ID NO: 536 - DNA, 25 bp, Artificial sequence
  Oligonucleotide sequence
ctccggagtccagcggcctttgagg

SEQ ID NO: 537 - DNA, 25 bp, Artificial sequence
  Oligonucleotide sequence
ctggcgtcagagcttctgcctgagc

SEQ ID NO: 538 - DNA, 25 bp, Artificial sequence
  Oligonucleotide sequence
gagatagctttttaactagcctgga

SEQ ID NO: 539 - DNA, 25 bp, Artificial sequence
  Oligonucleotide sequence
tttggtatccccctggcgtcagagc

SEQ ID NO: 540 - DNA, 25 bp, Artificial sequence
  Oligonucleotide sequence
tccctgcagccactagagatagctt

SEQ ID NO: 541 - DNA, 25 bp, Artificial sequence
  Oligonucleotide sequence
ttttaactagcctggagccttctgc

SEQ ID NO: 542 - DNA, 25 bp, Artificial sequence
  Oligonucleotide sequence
taactagcctggagccttctgccca

SEQ ID NO: 543 - DNA, 25 bp, Artificial sequence
  Oligonucleotide sequence
atgaaagccgccattgtcctggaga

SEQ ID NO: 544 - DNA, 25 bp, Artificial sequence
  Oligonucleotide sequence
attgtcctggagaagagcctgaacc

SEQ ID NO: 545 - DNA, 25 bp, Artificial sequence
  Oligonucleotide sequence
atccagaggctcgttggctcccaag

SEQ ID NO: 546 - DNA, 25 bp, Artificial sequence
  Oligonucleotide sequence
atctctgtgacttcttggagagcca

SEQ ID NO: 547 - DNA, 25 bp, Artificial sequence
  Oligonucleotide sequence
gatgggcgaccatctgaccaacatc

SEQ ID NO: 548 - DNA, 25 bp, Artificial sequence
  Oligonucleotide sequence
gggctgggcgagtatctctttgaaa

SEQ ID NO: 549 - DNA, 25 bp, Artificial sequence
  Oligonucleotide sequence
gggtacaaccctggatgccatgaaa

SEQ ID NO: 550 - DNA, 25 bp, Artificial sequence
  Oligonucleotide sequence
tggagagccacttcctagacgagga

SEQ ID NO: 551 - DNA, 25 bp, Artificial sequence
  Oligonucleotide sequence
tctttgaaaggctcaccctcaagca

SEQ ID NO: 552 - DNA, 25 bp, Artificial sequence
  Oligonucleotide sequence
tgaaccaggcccttttggatctgca

SEQ ID NO: 553 - DNA, 25 bp, Artificial sequence
  Oligonucleotide sequence
ttggatctgcatgccctgggttctg

SEQ ID NO: 554 - DNA, 25 bp, Artificial sequence
  Oligonucleotide sequence
atcagactgcactgcctgcgggagg

SEQ ID NO: 555 - DNA, 25 bp, Artificial sequence
  Oligonucleotide sequence
agcagtcaaaccaaagcattccatt

SEQ ID NO: 556 - DNA, 25 bp, Artificial sequence
  Oligonucleotide sequence
gttatggcctaatgcccacttttgt

SEQ ID NO: 557 - DNA, 25 bp, Artificial sequence
  Oligonucleotide sequence
gacggagcaagctcttgccatcaga

SEQ ID NO: 558 - DNA, 25 bp, Artificial sequence
  Oligonucleotide sequence
gacccagggagagaacgtcgctgct

SEQ ID NO: 559 - DNA, 25 bp, Artificial sequence
  Oligonucleotide sequence
gtctgtgttcaagtacctcacggga

SEQ ID NO: 560 - DNA, 25 bp, Artificial sequence
  Oligonucleotide sequence
gtcgctgctgtatactgtaacgtct

SEQ ID NO: 561 - DNA, 25 bp, Artificial sequence
  Oligonucleotide sequence
gggacgctccagatatttgaatctc

SEQ ID NO: 562 - DNA, 25 bp, Artificial sequence
  Oligonucleotide sequence
tgatcctcctcctgcgcagaataga

SEQ ID NO: 563 - DNA, 25 bp, Artificial sequence
  Oligonucleotide sequence
tgctcacacgtaacagtctggtggg

SEQ ID NO: 564 - DNA, 25 bp, Artificial sequence
  Oligonucleotide sequence
tctctattaacttactgctcacacg

SEQ ID NO: 565 - DNA, 25 bp, Artificial sequence
  Oligonucleotide sequence
atcttgcaccttcttcaggatttta

SEQ ID NO: 566 - DNA, 25 bp, Artificial sequence
  Oligonucleotide sequence
acctgcctgggcttctgggcctgtg

SEQ ID NO: 567 - DNA, 25 bp, Artificial sequence
  Oligonucleotide sequence
acagagggagccagcagctgtcccc

SEQ ID NO: 568 - DNA, 25 bp, Artificial sequence
  Oligonucleotide sequence
acacactttgcgtatctgagcgcgc

SEQ ID NO: 569 - DNA, 25 bp, Artificial sequence
  Oligonucleotide sequence
aaagcagtacctggtggccgtgtgc

SEQ ID NO: 570 - DNA, 25 bp, Artificial sequence
  Oligonucleotide sequence
gaagtcagaagccaagctttctccc

SEQ ID NO: 571 - DNA, 25 bp, Artificial sequence
  Oligonucleotide sequence
gtacctcctcctctggaggtgctgg

SEQ ID NO: 572 - DNA, 25 bp, Artificial sequence
  Oligonucleotide sequence
ggaagcgctggagccaccccgtgaa

SEQ ID NO: 573 - DNA, 25 bp, Artificial sequence
  Oligonucleotide sequence
tggcctgggctctgtctacagccac

SEQ ID NO: 574 - DNA, 25 bp, Artificial sequence
  Oligonucleotide sequence
tcgcactgggtcttatcttgcacct

SEQ ID NO: 575 - DNA, 25 bp, Artificial sequence
  Oligonucleotide sequence
tctgtgggccgcacgtacacacaca

SEQ ID NO: 576 - DNA, 25 bp, Artificial sequence
  Oligonucleotide sequence
accgaatccaggtgtggcacgcgga

SEQ ID NO: 577 - DNA, 25 bp, Artificial sequence
  Oligonucleotide sequence
agaaggcgcctgacttcgtgttcta

SEQ ID NO: 578 - DNA, 25 bp, Artificial sequence
  Oligonucleotide sequence
acgagctgtacatgcgccgcaggaa

SEQ ID NO: 579 - DNA, 25 bp, Artificial sequence
  Oligonucleotide sequence
aaagattggcttcccgtggagtgaa

SEQ ID NO: 580 - DNA, 25 bp, Artificial sequence
  Oligonucleotide sequence
acaagtctgggtacctaggctctga

SEQ ID NO: 581 - DNA, 25 bp, Artificial sequence
  Oligonucleotide sequence
aacaagcggatcctgcagctgtgca

SEQ ID NO: 582 - DNA, 25 bp, Artificial sequence
  Oligonucleotide sequence
ctacgctgtgcaggccaagtttgga

SEQ ID NO: 583 - DNA, 25 bp, Artificial sequence
  Oligonucleotide sequence
gaacagacctttggcttggagtcga

SEQ ID NO: 584 - DNA, 25 bp, Artificial sequence
  Oligonucleotide sequence
gatgcccttggactgaatatttatg

SEQ ID NO: 585 - DNA, 25 bp, Artificial sequence
  Oligonucleotide sequence
gtatctgaagattgcccaggacctg

SEQ ID NO: 586 - DNA, 25 bp, Artificial sequence
  Oligonucleotide sequence
tgtgcatgggcaaccacgagctgta

SEQ ID NO: 587 - DNA, 25 bp, Artificial sequence
  Oligonucleotide sequence
atgatggtgtacgtctggaccctca

SEQ ID NO: 588 - DNA, 25 bp, Artificial sequence
  Oligonucleotide sequence
atggtcaccatgcaaagatcgtctg

SEQ ID NO: 589 - DNA, 25 bp, Artificial sequence
  Oligonucleotide sequence
agtggtcacagtcttaagcgttgct

SEQ ID NO: 590 - DNA, 25 bp, Artificial sequence
  Oligonucleotide sequence
agatctgtacacgtccttctgaaag

SEQ ID NO: 591 - DNA, 25 bp, Artificial sequence
  Oligonucleotide sequence
agaacgcggcgtttctctaaatcct

SEQ ID NO: 592 - DNA, 25 bp, Artificial sequence
  Oligonucleotide sequence
acgggccgcatcagggacgagattc

SEQ ID NO: 593 - DNA, 25 bp, Artificial sequence
  Oligonucleotide sequence
gacaacgagcattttgcctctggcg

SEQ ID NO: 594 - DNA, 25 bp, Artificial sequence
  Oligonucleotide sequence
gttgctgacggctactcggagaaca

SEQ ID NO: 595 - DNA, 25 bp, Artificial sequence
  Oligonucleotide sequence
gtcaagatccaagatgcacaccgct

SEQ ID NO: 596 - DNA, 25 bp, Artificial sequence
  Oligonucleotide sequence
tggacgagcacacgttggtcacgac

SEQ ID NO: 597 - DNA, 25 bp, Artificial sequence
  Oligonucleotide sequence
tcgtctctctacagggtgttcagat

SEQ ID NO: 598 - DNA, 25 bp, Artificial sequence
  Oligonucleotide sequence
attctcgcagtttgcattgctgtca

SEQ ID NO: 599 - DNA, 25 bp, Artificial sequence
  Oligonucleotide sequence
agagaagactcccactaccaaagac

SEQ ID NO: 600 - DNA, 25 bp, Artificial sequence
  Oligonucleotide sequence
agagcagtccctgggtgtctgacag

SEQ ID NO: 601 - DNA, 25 bp, Artificial sequence
  Oligonucleotide sequence
agaatggctgatcatcttggcgtcc

SEQ ID NO: 602 - DNA, 25 bp, Artificial sequence
  Oligonucleotide sequence
acctgcaccttgaccttgggaagaa

SEQ ID NO: 603 - DNA, 25 bp, Artificial sequence
  Oligonucleotide sequence
cgacgagacacggaacctgcagaat

SEQ ID NO: 604 - DNA, 25 bp, Artificial sequence
  Oligonucleotide sequence
gaccagtttatgacagccgacgaga

SEQ ID NO: 605 - DNA, 25 bp, Artificial sequence
  Oligonucleotide sequence
gaccacccacggatctgaaacaagt

SEQ ID NO: 606 - DNA, 25 bp, Artificial sequence
  Oligonucleotide sequence
gagtcgtcagagacccaagaccagt

SEQ ID NO: 607 - DNA, 25 bp, Artificial sequence
  Oligonucleotide sequence
gggtcccatacggagacctcaaatt

SEQ ID NO: 608 - DNA, 25 bp, Artificial sequence
  Oligonucleotide sequence
tgtgatgtgctactgactgcttcat

SEQ ID NO: 609 - DNA, 25 bp, Artificial sequence
  Oligonucleotide sequence
aggaacctaacctgatgctctttcg

SEQ ID NO: 610 - DNA, 25 bp, Artificial sequence
  Oligonucleotide sequence
aggacccaactctgaatacattttt

SEQ ID NO: 611 - DNA, 25 bp, Artificial sequence
  Oligonucleotide sequence
agggcagttttctttgcccaagcct

SEQ ID NO: 612 - DNA, 25 bp, Artificial sequence
  Oligonucleotide sequence
agcctgcacatcttctcagcaaaaa

SEQ ID NO: 613 - DNA, 25 bp, Artificial sequence
  Oligonucleotide sequence
aagccttcggtgctagttagctctc

SEQ ID NO: 614 - DNA, 25 bp, Artificial sequence
  Oligonucleotide sequence
aactcccttaatctttcacacatgc

SEQ ID NO: 615 - DNA, 25 bp, Artificial sequence
  Oligonucleotide sequence
gcaataatccccacctgtctaaaaa

SEQ ID NO: 616 - DNA, 25 bp, Artificial sequence
  Oligonucleotide sequence
gaagatttctctctgtgactgcaac

SEQ ID NO: 617 - DNA, 25 bp, Artificial sequence
  Oligonucleotide sequence
gagaggttgccctacgaacagacag

SEQ ID NO: 618 - DNA, 25 bp, Artificial sequence
  Oligonucleotide sequence
gaaatgttaactcccttttgcagaa

SEQ ID NO: 619 - DNA, 25 bp, Artificial sequence
  Oligonucleotide sequence
gattgagattcaacctggccttacc

SEQ ID NO: 620 - DNA, 25 bp, Artificial sequence
  Oligonucleotide sequence
gagttcgaagtcaccctaatcacgt

SEQ ID NO: 621 - DNA, 25 bp, Artificial sequence
  Oligonucleotide sequence
caccaggactctagccccagagtgg

SEQ ID NO: 622 - DNA, 25 bp, Artificial sequence
  Oligonucleotide sequence
aaatggaactctccttttcgagcat

SEQ ID NO: 623 - DNA, 25 bp, Artificial sequence
  Oligonucleotide sequence
cggcccggacacaaggaggaagctc

SEQ ID NO: 624 - DNA, 25 bp, Artificial sequence
  Oligonucleotide sequence
gcgtctgaccccagcgaagggccag

SEQ ID NO: 625 - DNA, 25 bp, Artificial sequence
  Oligonucleotide sequence
gaagggccagccttgcttggttcag

SEQ ID NO: 626 - DNA, 25 bp, Artificial sequence
  Oligonucleotide sequence
gactgtggagggacaggcttcccct

SEQ ID NO: 627 - DNA, 25 bp, Artificial sequence
  Oligonucleotide sequence
gttagcttccccaaaagaattgtgt

SEQ ID NO: 628 - DNA, 25 bp, Artificial sequence
  Oligonucleotide sequence
gtcaccctaatcacgtaaatggaac

SEQ ID NO: 629 - DNA, 25 bp, Artificial sequence
  Oligonucleotide sequence
gtgcttgcttgggagttcgaagtca

SEQ ID NO: 630 - DNA, 25 bp, Artificial sequence
  Oligonucleotide sequence
tagccccagagtggctccagaaggt

SEQ ID NO: 631 - DNA, 25 bp, Artificial sequence
  Oligonucleotide sequence
caggctaccttctccatttggtttt

SEQ ID NO: 632 - DNA, 25 bp, Artificial sequence
  Oligonucleotide sequence
agatgtgtggcccaaaactgctcca

SEQ ID NO: 633 - DNA, 25 bp, Artificial sequence
  Oligonucleotide sequence
agccttcatgaagctggacacgcca

SEQ ID NO: 634 - DNA, 25 bp, Artificial sequence
  Oligonucleotide sequence
agaagctcctgttcagcacctcagt

SEQ ID NO: 635 - DNA, 25 bp, Artificial sequence
  Oligonucleotide sequence
aatacagtgtattttccagcttcct

SEQ ID NO: 636 - DNA, 25 bp, Artificial sequence
  Oligonucleotide sequence
caagtgacactactggcccaggcta

SEQ ID NO: 637 - DNA, 25 bp, Artificial sequence
  Oligonucleotide sequence
ccgtgcttttgttttgctgctgtaa

SEQ ID NO: 638 - DNA, 25 bp, Artificial sequence
  Oligonucleotide sequence
tgaaaacagcttaattcctcctgcc

SEQ ID NO: 639 - DNA, 25 bp, Artificial sequence
  Oligonucleotide sequence
tgataactcggaccgtgttcctgtg

SEQ ID NO: 640 - DNA, 25 bp, Artificial sequence
  Oligonucleotide sequence
ttccagaattccttcagccaagcta

SEQ ID NO: 641 - DNA, 25 bp, Artificial sequence
  Oligonucleotide sequence
ttcggatcccctctctgaagagaaa

SEQ ID NO: 642 - DNA, 25 bp, Artificial sequence
  Oligonucleotide sequence
attagagggcagctcagcctccctt

SEQ ID NO: 643 - DNA, 25 bp, Artificial sequence
  Oligonucleotide sequence
aggatcataggcctggacactccat

SEQ ID NO: 644 - DNA, 25 bp, Artificial sequence
  Oligonucleotide sequence
agtcacagtgacaacaacccattag

SEQ ID NO: 645 - DNA, 25 bp, Artificial sequence
  Oligonucleotide sequence
agaggatgagccactgcttgcctga

SEQ ID NO: 646 - DNA, 25 bp, Artificial sequence
  Oligonucleotide sequence
actgcttgcctgaggtgacctggct

SEQ ID NO: 647 - DNA, 25 bp, Artificial sequence
  Oligonucleotide sequence
aatgccaattggctggagacttcca

SEQ ID NO: 648 - DNA, 25 bp, Artificial sequence
  Oligonucleotide sequence
aatgccataggttagatgtccctca

SEQ ID NO: 649 - DNA, 25 bp, Artificial sequence
  Oligonucleotide sequence
caccattcaggtggctgtttttaaa

SEQ ID NO: 650 - DNA, 25 bp, Artificial sequence
  Oligonucleotide sequence
gcatttgggcagagcctgaactcaa

SEQ ID NO: 651 - DNA, 25 bp, Artificial sequence
  Oligonucleotide sequence
gagagagggctcacacagagctccc

SEQ ID NO: 652 - DNA, 25 bp, Artificial sequence
  Oligonucleotide sequence
tatcccatagctaggttattgccca

SEQ ID NO: 653 - DNA, 25 bp, Artificial sequence
  Oligonucleotide sequence
gtcccgggtacgttttgagatcctg

SEQ ID NO: 654 - DNA, 25 bp, Artificial sequence
  Oligonucleotide sequence
acaagttccctgcaatcaaggccat

SEQ ID NO: 655 - DNA, 25 bp, Artificial sequence
  Oligonucleotide sequence
atgctgtccatcgacgtggctgagt

SEQ ID NO: 656 - DNA, 25 bp, Artificial sequence
  Oligonucleotide sequence
agtcggtctggactgtttgctgatc

SEQ ID NO: 657 - DNA, 25 bp, Artificial sequence
  Oligonucleotide sequence
agcgaccctccgaatggatgctcag

SEQ ID NO: 658 - DNA, 25 bp, Artificial sequence
  Oligonucleotide sequence
acgcccatcaatgctgcaggacaga

SEQ ID NO: 659 - DNA, 25 bp, Artificial sequence
  Oligonucleotide sequence
gacagagtggcacctgacccagcga

SEQ ID NO: 660 - DNA, 25 bp, Artificial sequence
  Oligonucleotide sequence
gacttgatcacttttgcacattccc

SEQ ID NO: 661 - DNA, 25 bp, Artificial sequence
  Oligonucleotide sequence
ggttaaccatctgtcatggcactcg

SEQ ID NO: 662 - DNA, 25 bp, Artificial sequence
  Oligonucleotide sequence
tgcagttgggacattcgtgctactc

SEQ ID NO: 663 - DNA, 25 bp, Artificial sequence
  Oligonucleotide sequence
ttgctgacttctcctgcgacaagtt

SEQ ID NO: 664 - DNA, 25 bp, Artificial sequence
  Oligonucleotide sequence
acaggagcctttgggccaagtttct

SEQ ID NO: 665 - DNA, 25 bp, Artificial sequence
  Oligonucleotide sequence
attaccttctgtgtcatccggagac

SEQ ID NO: 666 - DNA, 25 bp, Artificial sequence
  Oligonucleotide sequence
agagaccaaattatcttccttccct

SEQ ID NO: 667 - DNA, 25 bp, Artificial sequence
  Oligonucleotide sequence
agaaacgcaagcatcgctctttcac

SEQ ID NO: 668 - DNA, 25 bp, Artificial sequence
  Oligonucleotide sequence
aaatctttgtccctgatttcccttg

SEQ ID NO: 669 - DNA, 25 bp, Artificial sequence
  Oligonucleotide sequence
aagtttctcttgtcccagtgaccag

SEQ ID NO: 670 - DNA, 25 bp, Artificial sequence
  Oligonucleotide sequence
ctgaagctacaagctgctcagctga

SEQ ID NO: 671 - DNA, 25 bp, Artificial sequence
  Oligonucleotide sequence
cctaggccagagattcagttgcaga

SEQ ID NO: 672 - DNA, 25 bp, Artificial sequence
  Oligonucleotide sequence
tactcggccgactcagagaccaaat

SEQ ID NO: 673 - DNA, 25 bp, Artificial sequence
  Oligonucleotide sequence
taccagccactctgagcgtttatcc

SEQ ID NO: 674 - DNA, 25 bp, Artificial sequence
  Oligonucleotide sequence
ttccctctctgtcctgaagaacaaa

SEQ ID NO: 675 - DNA, 25 bp, Artificial sequence
  Oligonucleotide sequence
actagtgtgggagaaaccagctttt

SEQ ID NO: 676 - DNA, 25 bp, Artificial sequence
  Oligonucleotide sequence
atcactgctttactctgttaattta

SEQ ID NO: 677 - DNA, 25 bp, Artificial sequence
  Oligonucleotide sequence
aaaaatcactgctttactctgttaa

SEQ ID NO: 678 - DNA, 25 bp, Artificial sequence
  Oligonucleotide sequence
aaatcactgctttactctgttaatt

SEQ ID NO: 679 - DNA, 25 bp, Artificial sequence
  Oligonucleotide sequence
cactgctttactctgttaatttaca

SEQ ID NO: 680 - DNA, 25 bp, Artificial sequence
  Oligonucleotide sequence
gcttttactgtttaaaaatcactgc

SEQ ID NO: 681 - DNA, 25 bp, Artificial sequence
  Oligonucleotide sequence
gctttactctgttaatttacaagga

SEQ ID NO: 682 - DNA, 25 bp, Artificial sequence
  Oligonucleotide sequence
gaattcggcacgaggaaattcctaa

SEQ ID NO: 683 - DNA, 25 bp, Artificial sequence
  Oligonucleotide sequence
gatactacagtgaaactagtgtggg

SEQ ID NO: 684 - DNA, 25 bp, Artificial sequence
  Oligonucleotide sequence
tgggagaaaccagcttttactgttt

SEQ ID NO: 685 - DNA, 25 bp, Artificial sequence
  Oligonucleotide sequence
tcggcacgaggaaattcctaacaag

SEQ ID NO: 686 - DNA, 25 bp, Artificial sequence
  Oligonucleotide sequence
atcttcatcatgcacatcttcaagc

SEQ ID NO: 687 - DNA, 25 bp, Artificial sequence
  Oligonucleotide sequence
agggatggaccagcacaggcctgca

SEQ ID NO: 688 - DNA, 25 bp, Artificial sequence
  Oligonucleotide sequence
catcctggtggcactggccaaagga

SEQ ID NO: 689 - DNA, 25 bp, Artificial sequence
  Oligonucleotide sequence
gcatgtggcaggatccctccagcag

SEQ ID NO: 690 - DNA, 25 bp, Artificial sequence
  Oligonucleotide sequence
gaaatgatgcggctgctgcctgacc

SEQ ID NO: 691 - DNA, 25 bp, Artificial sequence
  Oligonucleotide sequence
gagtcaagccctaaggatccagcgg

SEQ ID NO: 692 - DNA, 25 bp, Artificial sequence
  Oligonucleotide sequence
gatccagcggcagtgacagaatcca

SEQ ID NO: 693 - DNA, 25 bp, Artificial sequence
  Oligonucleotide sequence
gggaacagaggcctcagcatcaaag

SEQ ID NO: 694 - DNA, 25 bp, Artificial sequence
  Oligonucleotide sequence
tgcggtttgacatcagcttgaagaa

SEQ ID NO: 695 - DNA, 25 bp, Artificial sequence
  Oligonucleotide sequence
tgggtcttaccatcttcatcatgca

SEQ ID NO: 696 - DNA, 25 bp, Artificial sequence
  Oligonucleotide sequence
ttgaagaagaacacccacacctact

SEQ ID NO: 697 - DNA, 25 bp, Artificial sequence
  Oligonucleotide sequence
atgattccagcagtggtcttgctct

SEQ ID NO: 698 - DNA, 25 bp, Artificial sequence
  Oligonucleotide sequence
accctacccctgtaatgatgctatg

SEQ ID NO: 699 - DNA, 25 bp, Artificial sequence
  Oligonucleotide sequence
ctgccattaatgctagctgacccta

SEQ ID NO: 700 - DNA, 25 bp, Artificial sequence
  Oligonucleotide sequence
gtacccggacccaggagacttatga

SEQ ID NO: 701 - DNA, 25 bp, Artificial sequence
  Oligonucleotide sequence
gagagcctcagctttgctatattct

SEQ ID NO: 702 - DNA, 25 bp, Artificial sequence
  Oligonucleotide sequence
gatgccatcctgttcttgtatggta

SEQ ID NO: 703 - DNA, 25 bp, Artificial sequence
  Oligonucleotide sequence
tgtttatattctagtctcaccccta

SEQ ID NO: 704 - DNA, 25 bp, Artificial sequence
  Oligonucleotide sequence
tttcaaacagatgcccttggtcaca

SEQ ID NO: 705 - DNA, 25 bp, Artificial sequence
  Oligonucleotide sequence
taacggacatcagtggttcctcttc

SEQ ID NO: 706 - DNA, 25 bp, Artificial sequence
  Oligonucleotide sequence
ttggttgaacaagcagcggccctgg

SEQ ID NO: 707 - DNA, 25 bp, Artificial sequence
  Oligonucleotide sequence
ttgctcttactccttttggttgaac

SEQ ID NO: 708 - DNA, 25 bp, Artificial sequence
  Oligonucleotide sequence
cagaagaacgtctccaagaacccgg

SEQ ID NO: 709 - DNA, 25 bp, Artificial sequence
  Oligonucleotide sequence
caccaagaccaaagggcggtcccag

SEQ ID NO: 710 - DNA, 25 bp, Artificial sequence
  Oligonucleotide sequence
aggagccgcaagtgtacgtcctggc

SEQ ID NO: 711 - DNA, 25 bp, Artificial sequence
  Oligonucleotide sequence
agttcaacagcacttaccgcgtggt

SEQ ID NO: 712 - DNA, 25 bp, Artificial sequence
  Oligonucleotide sequence
aatcaacatcgagtggcagagtaat

SEQ ID NO: 713 - DNA, 25 bp, Artificial sequence
  Oligonucleotide sequence
acccagacgagctgtccaagagcaa

SEQ ID NO: 714 - DNA, 25 bp, Artificial sequence
  Oligonucleotide sequence
acgagctgtccaagagcaaggtcag

SEQ ID NO: 715 - DNA, 25 bp, Artificial sequence
  Oligonucleotide sequence
aagctctccgtggacaggaacaggt

SEQ ID NO: 716 - DNA, 25 bp, Artificial sequence
  Oligonucleotide sequence
gcacttaccgcgtggtcagcgtcct

SEQ ID NO: 717 - DNA, 25 bp, Artificial sequence
  Oligonucleotide sequence
tcgagaggaccatcaccaagaccaa

SEQ ID NO: 718 - DNA, 25 bp, Artificial sequence
  Oligonucleotide sequence
tacccacctgaaatcaacatcgagt

SEQ ID NO: 719 - DNA, 25 bp, Artificial sequence
  Oligonucleotide sequence
agctggctcagcaacgggaactacc

SEQ ID NO: 720 - DNA, 25 bp, Artificial sequence
  Oligonucleotide sequence
aacgctgtcacagacctagcagtta

SEQ ID NO: 721 - DNA, 25 bp, Artificial sequence
  Oligonucleotide sequence
aagtggctggcgtatgggtcaaaat

SEQ ID NO: 722 - DNA, 25 bp, Artificial sequence
  Oligonucleotide sequence
gcggacccaccatttgcaatgagac

SEQ ID NO: 723 - DNA, 25 bp, Artificial sequence
  Oligonucleotide sequence
gctgtacttttgacaatgcctgtga

SEQ ID NO: 724 - DNA, 25 bp, Artificial sequence
  Oligonucleotide sequence
tagcagttaaccaggcgcggaccca

SEQ ID NO: 725 - DNA, 25 bp, Artificial sequence
  Oligonucleotide sequence
gaactaccgtgtccagagcatcctg

SEQ ID NO: 726 - DNA, 25 bp, Artificial sequence
  Oligonucleotide sequence
gggaaggaccctatggtgctcaaaa

SEQ ID NO: 727 - DNA, 25 bp, Artificial sequence
  Oligonucleotide sequence
ggctccgtagcttttcctgggataa

SEQ ID NO: 728 - DNA, 25 bp, Artificial sequence
  Oligonucleotide sequence
tggtgctcaaaagcctgactctgga

SEQ ID NO: 729 - DNA, 25 bp, Artificial sequence
  Oligonucleotide sequence
tgatatactagacgctttgactccc

SEQ ID NO: 730 - DNA, 25 bp, Artificial sequence
  Oligonucleotide sequence
atagcctccatttccttcaatagat

SEQ ID NO: 731 - DNA, 25 bp, Artificial sequence
  Oligonucleotide sequence
atcgtttaaggcagatgtccccgga

SEQ ID NO: 732 - DNA, 25 bp, Artificial sequence
  Oligonucleotide sequence
atcaccagttcttatgtcaccttag

SEQ ID NO: 733 - DNA, 25 bp, Artificial sequence
  Oligonucleotide sequence
agtgggatgccttaaacacccgcac

SEQ ID NO: 734 - DNA, 25 bp, Artificial sequence
  Oligonucleotide sequence
caaactggtatctgtcatctggtaa

SEQ ID NO: 735 - DNA, 25 bp, Artificial sequence
  Oligonucleotide sequence
gcagaccgatgtggtaccggctgaa

SEQ ID NO: 736 - DNA, 25 bp, Artificial sequence
  Oligonucleotide sequence
gatgtccccggaagagcagtttttt

SEQ ID NO: 737 - DNA, 25 bp, Artificial sequence
  Oligonucleotide sequence
gggatgcctcaaaatgcagaccgat

SEQ ID NO: 738 - DNA, 25 bp, Artificial sequence
  Oligonucleotide sequence
ggatccgatctattgttacaggcac

SEQ ID NO: 739 - DNA, 25 bp, Artificial sequence
  Oligonucleotide sequence
tggttcgttatcttctctttggcaa

SEQ ID NO: 740 - DNA, 25 bp, Artificial sequence
  Oligonucleotide sequence
tgggttgctactgccatggtttgaa

SEQ ID NO: 741 - DNA, 25 bp, Artificial sequence
  Oligonucleotide sequence
attttgaggcatcccttctaggtgc

SEQ ID NO: 742 - DNA, 25 bp, Artificial sequence
  Oligonucleotide sequence
aaatggaggctatcgtcatggcagg

SEQ ID NO: 743 - DNA, 25 bp, Artificial sequence
  Oligonucleotide sequence
cagttccttcaaaccatggcagtag

SEQ ID NO: 744 - DNA, 25 bp, Artificial sequence
  Oligonucleotide sequence
gatcccctctggttatagttcgtga

SEQ ID NO: 745 - DNA, 25 bp, Artificial sequence
  Oligonucleotide sequence
gtagcaacccagtgcctgtaacaat

SEQ ID NO: 746 - DNA, 25 bp, Artificial sequence
  Oligonucleotide sequence
gggaatattctttcagccggtacca

SEQ ID NO: 747 - DNA, 25 bp, Artificial sequence
  Oligonucleotide sequence
tttaaggcatcccactgtagactct

SEQ ID NO: 748 - DNA, 25 bp, Artificial sequence
  Oligonucleotide sequence
tgtagactcttctctcgggaatatt

SEQ ID NO: 749 - DNA, 25 bp, Artificial sequence
  Oligonucleotide sequence
tctgtccccaccattgattctaagg

SEQ ID NO: 750 - DNA, 25 bp, Artificial sequence
  Oligonucleotide sequence
taccacatcggtctgcattttgagg

SEQ ID NO: 751 - DNA, 25 bp, Artificial sequence
  Oligonucleotide sequence
taggtgctcaatgccattaccagat

SEQ ID NO: 752 - DNA, 25 bp, Artificial sequence
  Oligonucleotide sequence
ataggagccttgtgttttgtcatct

SEQ ID NO: 753 - DNA, 25 bp, Artificial sequence
  Oligonucleotide sequence
aagcctttggttcagagcagcctag

SEQ ID NO: 754 - DNA, 25 bp, Artificial sequence
  Oligonucleotide sequence
aagttctcgggactatccagatcct

SEQ ID NO: 755 - DNA, 25 bp, Artificial sequence
  Oligonucleotide sequence
cagcattttacccaagcgttttcta

SEQ ID NO: 756 - DNA, 25 bp, Artificial sequence
  Oligonucleotide sequence
ctgcaaacattctgagctctctatc

SEQ ID NO: 757 - DNA, 25 bp, Artificial sequence
  Oligonucleotide sequence
gaaggctgcttacccattcatagga

SEQ ID NO: 758 - DNA, 25 bp, Artificial sequence
  Oligonucleotide sequence
gaattattttggcatcggcttcctt

SEQ ID NO: 759 - DNA, 25 bp, Artificial sequence
  Oligonucleotide sequence
gtcatactggcttctttgggtcctg

SEQ ID NO: 760 - DNA, 25 bp, Artificial sequence
  Oligonucleotide sequence
gtcatctctggatctctatcaatca

SEQ ID NO: 761 - DNA, 25 bp, Artificial sequence
  Oligonucleotide sequence
tagctggaaccaacgggctgatcct

SEQ ID NO: 762 - DNA, 25 bp, Artificial sequence
  Oligonucleotide sequence
tatcagctctggtgggtttcatcct

SEQ ID NO: 763 - DNA, 25 bp, Artificial sequence
  Oligonucleotide sequence
gtcaagtctgactgaatgaggccac

SEQ ID NO: 764 - DNA, 25 bp, Artificial sequence
  Oligonucleotide sequence
agagggacctcgtcaggcacttcta

SEQ ID NO: 765 - DNA, 25 bp, Artificial sequence
  Oligonucleotide sequence
actgcagtagtgacccttcaagagg

SEQ ID NO: 766 - DNA, 25 bp, Artificial sequence
  Oligonucleotide sequence
aagagacgtcatggccccgtacgtg

SEQ ID NO: 767 - DNA, 25 bp, Artificial sequence
  Oligonucleotide sequence
cagccactggctgatttcaagtcat

SEQ ID NO: 768 - DNA, 25 bp, Artificial sequence
  Oligonucleotide sequence
ctggtggaagagatcccgcggaacc

SEQ ID NO: 769 - DNA, 25 bp, Artificial sequence
  Oligonucleotide sequence
gccctcggagcttctgctggtggaa

SEQ ID NO: 770 - DNA, 25 bp, Artificial sequence
  Oligonucleotide sequence
gaagcccctagctcaggcagaacag

SEQ ID NO: 771 - DNA, 25 bp, Artificial sequence
  Oligonucleotide sequence
tggaaagtccagaggtgtcaccagg

SEQ ID NO: 772 - DNA, 25 bp, Artificial sequence
  Oligonucleotide sequence
tggctgtgattggagttccggacat

SEQ ID NO: 773 - DNA, 25 bp, Artificial sequence
  Oligonucleotide sequence
tgtcccacagggagctcaaagagtg

SEQ ID NO: 774 - DNA, 25 bp, Artificial sequence
  Oligonucleotide sequence
atttagctactttattgcctttaca

SEQ ID NO: 775 - DNA, 25 bp, Artificial sequence
  Oligonucleotide sequence
aattgttattattacgctctttgcg

SEQ ID NO: 776 - DNA, 25 bp, Artificial sequence
  Oligonucleotide sequence
gcctttacattgcttattcttattg

SEQ ID NO: 777 - DNA, 25 bp, Artificial sequence
  Oligonucleotide sequence
gcactttctttgattacacttccat

SEQ ID NO: 778 - DNA, 25 bp, Artificial sequence
  Oligonucleotide sequence
gaattctgtccttcatttactttgt

SEQ ID NO: 779 - DNA, 25 bp, Artificial sequence
  Oligonucleotide sequence
gaaaagtcgtctcctagtaaccagt

SEQ ID NO: 780 - DNA, 25 bp, Artificial sequence
  Oligonucleotide sequence
gacaaacagctttaagtgcactttc

SEQ ID NO: 781 - DNA, 25 bp, Artificial sequence
  Oligonucleotide sequence
gatctagctgggaaactgtcatgag

SEQ ID NO: 782 - DNA, 25 bp, Artificial sequence
  Oligonucleotide sequence
gttgctttttccttctttgatctaa

SEQ ID NO: 783 - DNA, 25 bp, Artificial sequence
  Oligonucleotide sequence
taacttcaatcctcagatctagctg

SEQ ID NO: 784 - DNA, 25 bp, Artificial sequence
  Oligonucleotide sequence
ttctgaagccttttatgtaccacta

SEQ ID NO: 785 - DNA, 25 bp, Artificial sequence
  Oligonucleotide sequence
atttccattctcctacatttgttga

SEQ ID NO: 786 - DNA, 25 bp, Artificial sequence
  Oligonucleotide sequence
agatattctagcctccacagattgc

SEQ ID NO: 787 - DNA, 25 bp, Artificial sequence
  Oligonucleotide sequence
agatgattgctatgcttcctgtgct

SEQ ID NO: 788 - DNA, 25 bp, Artificial sequence
  Oligonucleotide sequence
acctttctgaggatttgtgtggatc

SEQ ID NO: 789 - DNA, 25 bp, Artificial sequence
  Oligonucleotide sequence
cctccaatccgctcatatttttgta

SEQ ID NO: 790 - DNA, 25 bp, Artificial sequence
  Oligonucleotide sequence
gaaacattcacaaagattcgcgtta

SEQ ID NO: 791 - DNA, 25 bp, Artificial sequence
  Oligonucleotide sequence
gttggcaagcttaacaaacctgttt

SEQ ID NO: 792 - DNA, 25 bp, Artificial sequence
  Oligonucleotide sequence
gtgtggatctgatatccggcaaatt

SEQ ID NO: 793 - DNA, 25 bp, Artificial sequence
  Oligonucleotide sequence
ggcaaatttttgtgctttacattct

SEQ ID NO: 794 - DNA, 25 bp, Artificial sequence
  Oligonucleotide sequence
tgtattacccagctttcctttaaat

SEQ ID NO: 795 - DNA, 25 bp, Artificial sequence
  Oligonucleotide sequence
tgtgctgtgtgctccttgaaagtaa

SEQ ID NO: 796 - DNA, 25 bp, Artificial sequence
  Oligonucleotide sequence
atagatgttctatgctgtcctggac

SEQ ID NO: 797 - DNA, 25 bp, Artificial sequence
  Oligonucleotide sequence
acatcacaatgatttgtccccagcg

SEQ ID NO: 798 - DNA, 25 bp, Artificial sequence
  Oligonucleotide sequence
aaccagcccatgacagttttttgta

SEQ ID NO: 799 - DNA, 25 bp, Artificial sequence
  Oligonucleotide sequence
gcagtttccctttgcattgtattgc

SEQ ID NO: 800 - DNA, 25 bp, Artificial sequence
  Oligonucleotide sequence
gacccttttatcctttctaggcaca

SEQ ID NO: 801 - DNA, 25 bp, Artificial sequence
  Oligonucleotide sequence
gactgcattttgtagctctgtaatc

SEQ ID NO: 802 - DNA, 25 bp, Artificial sequence
  Oligonucleotide sequence
gtaattttcttctttcctgactttg

SEQ ID NO: 803 - DNA, 25 bp, Artificial sequence
  Oligonucleotide sequence
gtgagcctacctatagcactggatt

SEQ ID NO: 804 - DNA, 25 bp, Artificial sequence
  Oligonucleotide sequence
tgtctgcatcatttctttagttatc

SEQ ID NO: 805 - DNA, 25 bp, Artificial sequence
  Oligonucleotide sequence
tttgggtctaattctgtgagcctac

SEQ ID NO: 806 - DNA, 25 bp, Artificial sequence
  Oligonucleotide sequence
ttctgcatgttgtatctagtctgat

SEQ ID NO: 807 - DNA, 25 bp, Artificial sequence
  Oligonucleotide sequence
atgtgataacagcacctcttcatct

SEQ ID NO: 808 - DNA, 25 bp, Artificial sequence
  Oligonucleotide sequence
acttcaagtcttgcaatggtgcttt

SEQ ID NO: 809 - DNA, 25 bp, Artificial sequence
  Oligonucleotide sequence
aaacgcaaccagttcatcgggattt

SEQ ID NO: 810 - DNA, 25 bp, Artificial sequence
  Oligonucleotide sequence
cttccaaattggcttttacagatcc

SEQ ID NO: 811 - DNA, 25 bp, Artificial sequence
  Oligonucleotide sequence
cagcacctcttcatctttaacttga

SEQ ID NO: 812 - DNA, 25 bp, Artificial sequence
  Oligonucleotide sequence
cttggttaggagtggtttgctgccc

SEQ ID NO: 813 - DNA, 25 bp, Artificial sequence
  Oligonucleotide sequence
gaaatttccttttctgagtgttgaa

SEQ ID NO: 814 - DNA, 25 bp, Artificial sequence
  Oligonucleotide sequence
gttagcagactagaagacttccaaa

SEQ ID NO: 815 - DNA, 25 bp, Artificial sequence
  Oligonucleotide sequence
ggaacattttacacacttcaagtct

SEQ ID NO: 816 - DNA, 25 bp, Artificial sequence
  Oligonucleotide sequence
tttgctgccctcctctaaaggcagt

SEQ ID NO: 817 - DNA, 25 bp, Artificial sequence
  Oligonucleotide sequence
ttcctgtcagtttcatccaatctta

SEQ ID NO: 818 - DNA, 25 bp, Artificial sequence
  Oligonucleotide sequence
aaagtgctacactcctttggtgagg

SEQ ID NO: 819 - DNA, 25 bp, Artificial sequence
  Oligonucleotide sequence
aacgtgctggttgttgtgctggctc

SEQ ID NO: 820 - DNA, 25 bp, Artificial sequence
  Oligonucleotide sequence
aagagaaggcagctgtcttggccct

SEQ ID NO: 821 - DNA, 25 bp, Artificial sequence
  Oligonucleotide sequence
tggcaaggatttcaccccagagttg

SEQ ID NO: 822 - DNA, 25 bp, Artificial sequence
  Oligonucleotide sequence
cagagttgcaggcttcctatcaaaa

SEQ ID NO: 823 - DNA, 25 bp, Artificial sequence
  Oligonucleotide sequence
gacaagctgcacgtggatcctgaga

SEQ ID NO: 824 - DNA, 25 bp, Artificial sequence
  Oligonucleotide sequence
gagaaaggcctctttgtgcccaaag

SEQ ID NO: 825 - DNA, 25 bp, Artificial sequence
  Oligonucleotide sequence
gagatcctggcttctgcctaataaa

SEQ ID NO: 826 - DNA, 25 bp, Artificial sequence
  Oligonucleotide sequence
gatctgtccaatcctggtgctgtga

SEQ ID NO: 827 - DNA, 25 bp, Artificial sequence
  Oligonucleotide sequence
tggttgtctacccatggactcagag

SEQ ID NO: 828 - DNA, 25 bp, Artificial sequence
  Oligonucleotide sequence
tgagggcgtgcatcatcttgacaac

SEQ ID NO: 829 - DNA, 25 bp, Artificial sequence
  Oligonucleotide sequence
atcaccgtcgtgaagcaaggctttg

SEQ ID NO: 830 - DNA, 25 bp, Artificial sequence
  Oligonucleotide sequence
aaagacggaagccttgacctctgct

SEQ ID NO: 831 - DNA, 25 bp, Artificial sequence
  Oligonucleotide sequence
aacgatgcctttgtcctgaaaactc

SEQ ID NO: 832 - DNA, 25 bp, Artificial sequence
  Oligonucleotide sequence
aaggcagcgagccagacagcttctg

SEQ ID NO: 833 - DNA, 25 bp, Artificial sequence
  Oligonucleotide sequence
gaagacctggccactgatgacgtca

SEQ ID NO: 834 - DNA, 25 bp, Artificial sequence
  Oligonucleotide sequence
gaagaggtccctggcgagttcatgc

SEQ ID NO: 835 - DNA, 25 bp, Artificial sequence
  Oligonucleotide sequence
gaccaggtctttgtctgggtcggaa

SEQ ID NO: 836 - DNA, 25 bp, Artificial sequence
  Oligonucleotide sequence
gacagctactggtctgtggatccct

SEQ ID NO: 837 - DNA, 25 bp, Artificial sequence
  Oligonucleotide sequence
gtatatcgacacagacccagctcat

SEQ ID NO: 838 - DNA, 25 bp, Artificial sequence
  Oligonucleotide sequence
ggagccacccgagccgttgagataa

SEQ ID NO: 839 - DNA, 25 bp, Artificial sequence
  Oligonucleotide sequence
tctttgcctgctccaacaagattgg

SEQ ID NO: 840 - DNA, 25 bp, Artificial sequence
  Oligonucleotide sequence
atagcctcactagaggtctagcggt

SEQ ID NO: 841 - DNA, 25 bp, Artificial sequence
  Oligonucleotide sequence
aaacgtctactctctcctgtaagaa

SEQ ID NO: 842 - DNA, 25 bp, Artificial sequence
  Oligonucleotide sequence
gcaccccagaccgtatttatcatat

SEQ ID NO: 843 - DNA, 25 bp, Artificial sequence
  Oligonucleotide sequence
gaatcagattactttggcaggcttg

SEQ ID NO: 844 - DNA, 25 bp, Artificial sequence
  Oligonucleotide sequence
gacaacacactttactttgtagctg

SEQ ID NO: 845 - DNA, 25 bp, Artificial sequence
  Oligonucleotide sequence
gaccaagttctcttcattaaccagg

SEQ ID NO: 846 - DNA, 25 bp, Artificial sequence
  Oligonucleotide sequence
ggcaggcttgaacctaaactctcaa

SEQ ID NO: 847 - DNA, 25 bp, Artificial sequence
  Oligonucleotide sequence
ggatatgcctgattctgattgtaca

SEQ ID NO: 848 - DNA, 25 bp, Artificial sequence
  Oligonucleotide sequence
ggaaatgagtcctcctgagaatatc

SEQ ID NO: 849 - DNA, 25 bp, Artificial sequence
  Oligonucleotide sequence
tgattgtacagacaacgcaccccag

SEQ ID NO: 850 - DNA, 25 bp, Artificial sequence
  Oligonucleotide sequence
tagcggtaaccatctctgtgaagtg

SEQ ID NO: 851 - DNA, 25 bp, Artificial sequence
  Oligonucleotide sequence
ttaagcctgaactggtcccgggaga

SEQ ID NO: 852 - DNA, 25 bp, Artificial sequence
  Oligonucleotide sequence
agagctccaaggacaaggtcaccct

SEQ ID NO: 853 - DNA, 25 bp, Artificial sequence
  Oligonucleotide sequence
agaccctggtaaatgatgccctctg

SEQ ID NO: 854 - DNA, 25 bp, Artificial sequence
  Oligonucleotide sequence
aatttgcctgcaaggtggtccacga

SEQ ID NO: 855 - DNA, 25 bp, Artificial sequence
  Oligonucleotide sequence
gagacttacaagtgcaccgtgtccc

SEQ ID NO: 856 - DNA, 25 bp, Artificial sequence
  Oligonucleotide sequence
gaaagaggtgtccaaagaccctggt

SEQ ID NO: 857 - DNA, 25 bp, Artificial sequence
  Oligonucleotide sequence
tgtcccaaaggaccctccagaaaga

SEQ ID NO: 858 - DNA, 25 bp, Artificial sequence
  Oligonucleotide sequence
gtggacaccaccgactggatcgagg

SEQ ID NO: 859 - DNA, 25 bp, Artificial sequence
  Oligonucleotide sequence
gggagcccctgcagaagcacacact

SEQ ID NO: 860 - DNA, 25 bp, Artificial sequence
  Oligonucleotide sequence
tgcccagggaagtcgtgcgctccat

SEQ ID NO: 861 - DNA, 25 bp, Artificial sequence
  Oligonucleotide sequence
taatccagacagaccagcaagccac

SEQ ID NO: 862 - DNA, 25 bp, Artificial sequence
  Oligonucleotide sequence
atctttgacatcttagccatcctaa

SEQ ID NO: 863 - DNA, 25 bp, Artificial sequence
  Oligonucleotide sequence
agaaggctcctgattcagatcctcc

SEQ ID NO: 864 - DNA, 25 bp, Artificial sequence
  Oligonucleotide sequence
acatcgtctcccaagtcttttgaat

SEQ ID NO: 865 - DNA, 25 bp, Artificial sequence
  Oligonucleotide sequence
acaggactgctaatccctttgagtt

SEQ ID NO: 866 - DNA, 25 bp, Artificial sequence
  Oligonucleotide sequence
aaacatcctggtcattctttagcgt

SEQ ID NO: 867 - DNA, 25 bp, Artificial sequence
  Oligonucleotide sequence
aagtcagctaaggagtccgtgccag

SEQ ID NO: 868 - DNA, 25 bp, Artificial sequence
  Oligonucleotide sequence
gctgcaacataccaggcattgtgct

SEQ ID NO: 869 - DNA, 25 bp, Artificial sequence
  Oligonucleotide sequence
gaatggaaaccatctcatctttgac

SEQ ID NO: 870 - DNA, 25 bp, Artificial sequence
  Oligonucleotide sequence
gactgggccccagtgagttcagaaa

SEQ ID NO: 871 - DNA, 25 bp, Artificial sequence
  Oligonucleotide sequence
ggcaggtgattctgtcgtgcacaag

SEQ ID NO: 872 - DNA, 25 bp, Artificial sequence
  Oligonucleotide sequence
tctctgttcaattttcccttttcta

SEQ ID NO: 873 - DNA, 25 bp, Artificial sequence
  Oligonucleotide sequence
ataagttctatttccacctgatgct

SEQ ID NO: 874 - DNA, 25 bp, Artificial sequence
  Oligonucleotide sequence
agagacttcattcctggtgtggcca

SEQ ID NO: 875 - DNA, 25 bp, Artificial sequence
  Oligonucleotide sequence
aaagttattgtcgtggtgtcccagc

SEQ ID NO: 876 - DNA, 25 bp, Artificial sequence
  Oligonucleotide sequence
cagcacttcattcagagccgatggt

SEQ ID NO: 877 - DNA, 25 bp, Artificial sequence
  Oligonucleotide sequence
gcgggtcggttttcagtatactcat

SEQ ID NO: 878 - DNA, 25 bp, Artificial sequence
  Oligonucleotide sequence
ctgatgcttcttgctggctgcaaaa

SEQ ID NO: 879 - DNA, 25 bp, Artificial sequence
  Oligonucleotide sequence
gcatgcccgtgctgggttttaacaa

SEQ ID NO: 880 - DNA, 25 bp, Artificial sequence
  Oligonucleotide sequence
gatgcctttgttatctactcaagcc

SEQ ID NO: 881 - DNA, 25 bp, Artificial sequence
  Oligonucleotide sequence
ggtgtgtgcaatacccttacagatg

SEQ ID NO: 882 - DNA, 25 bp, Artificial sequence
  Oligonucleotide sequence
tgagtatgagattgcccagacctgg

SEQ ID NO: 883 - DNA, 25 bp, Artificial sequence
  Oligonucleotide sequence
ttaacaatgccacctgtcagattag

SEQ ID NO: 884 - DNA, 25 bp, Artificial sequence
  Oligonucleotide sequence
agttaggcagccatagcttctccaa

SEQ ID NO: 885 - DNA, 25 bp, Artificial sequence
  Oligonucleotide sequence
agaagttccccattggacatctcaa

SEQ ID NO: 886 - DNA, 25 bp, Artificial sequence
  Oligonucleotide sequence
catctctccaccttgatattgacag

SEQ ID NO: 887 - DNA, 25 bp, Artificial sequence
  Oligonucleotide sequence
gaaaatgccaggatgatgccgccca

SEQ ID NO: 888 - DNA, 25 bp, Artificial sequence
  Oligonucleotide sequence
gacctgaatctctacaaaatccctg

SEQ ID NO: 889 - DNA, 25 bp, Artificial sequence
  Oligonucleotide sequence
gtgcaggtggttcctaacactactt

SEQ ID NO: 890 - DNA, 25 bp, Artificial sequence
  Oligonucleotide sequence
gtggccgtggagacaaagctttcat

SEQ ID NO: 891 - DNA, 25 bp, Artificial sequence
  Oligonucleotide sequence
tggactctccagtttacagacgctg

SEQ ID NO: 892 - DNA, 25 bp, Artificial sequence
  Oligonucleotide sequence
tggacctgagctttaaccccttgaa

SEQ ID NO: 893 - DNA, 25 bp, Artificial sequence
  Oligonucleotide sequence
tgatgcatatcagggcctcaaccat

SEQ ID NO: 894 - DNA, 25 bp, Artificial sequence
  Oligonucleotide sequence
ttacggtgcgtcatgctttcacagg

SEQ ID NO: 895 - DNA, 25 bp, Artificial sequence
  Oligonucleotide sequence
aaacaggccagtgattttccagtat

SEQ ID NO: 896 - DNA, 25 bp, Artificial sequence
  Oligonucleotide sequence
aaagatttgacacatctgccctgcg

SEQ ID NO: 897 - DNA, 25 bp, Artificial sequence
  Oligonucleotide sequence
gatatttcttacactaacacccgag

SEQ ID NO: 898 - DNA, 25 bp, Artificial sequence
  Oligonucleotide sequence
gcgcggactgcacaatttgacgatt

SEQ ID NO: 899 - DNA, 25 bp, Artificial sequence
  Oligonucleotide sequence
gaattccggttagcatacattgata

SEQ ID NO: 900 - DNA, 25 bp, Artificial sequence
  Oligonucleotide sequence
gaaggatttcccacattggagctca

SEQ ID NO: 901 - DNA, 25 bp, Artificial sequence
  Oligonucleotide sequence
gattttccagtattcttatccctca

SEQ ID NO: 902 - DNA, 25 bp, Artificial sequence
  Oligonucleotide sequence
ggatttccagcattccactttgaaa

SEQ ID NO: 903 - DNA, 25 bp, Artificial sequence
  Oligonucleotide sequence
ggagctcacctctctcaaaaggttg

SEQ ID NO: 904 - DNA, 25 bp, Artificial sequence
  Oligonucleotide sequence
tgagtttcaagtcctgctgttctga

SEQ ID NO: 905 - DNA, 25 bp, Artificial sequence
  Oligonucleotide sequence
taccaagccttgagtttctagatct

SEQ ID NO: 906 - DNA, 25 bp, Artificial sequence
  Oligonucleotide sequence
atggtgccatggctggtagctttta

SEQ ID NO: 907 - DNA, 25 bp, Artificial sequence
  Oligonucleotide sequence
aggcagacactgctgtatttagaaa

SEQ ID NO: 908 - DNA, 25 bp, Artificial sequence
  Oligonucleotide sequence
aaaacagaactcacagcctttctcc

SEQ ID NO: 909 - DNA, 25 bp, Artificial sequence
  Oligonucleotide sequence
gctaatgaagcttctcatcttctat

SEQ ID NO: 910 - DNA, 25 bp, Artificial sequence
  Oligonucleotide sequence
gaatatcttggcacactttaatgtc

SEQ ID NO: 911 - DNA, 25 bp, Artificial sequence
  Oligonucleotide sequence
gatatttgttgcacaggcagacact

SEQ ID NO: 912 - DNA, 25 bp, Artificial sequence
  Oligonucleotide sequence
gtagcttttagtgagtgctgcaaga

SEQ ID NO: 913 - DNA, 25 bp, Artificial sequence
  Oligonucleotide sequence
gatttttcatctgatttgttcacgc

SEQ ID NO: 914 - DNA, 25 bp, Artificial sequence
  Oligonucleotide sequence
gttcacgcaaatgtagttcttatca

SEQ ID NO: 915 - DNA, 25 bp, Artificial sequence
  Oligonucleotide sequence
tatacaaaatttccattcctcccaa

SEQ ID NO: 916 - DNA, 25 bp, Artificial sequence
  Oligonucleotide sequence
ttctccctgtgtctttggcaatgta

SEQ ID NO: 917 - DNA, 25 bp, Artificial sequence
  Oligonucleotide sequence
atgagcgtcttttctcagtactcag

SEQ ID NO: 918 - DNA, 25 bp, Artificial sequence
  Oligonucleotide sequence
aaaatagcacctctgtgtcttctct

SEQ ID NO: 919 - DNA, 25 bp, Artificial sequence
  Oligonucleotide sequence
aacacagctgtctcgatttctggtg

SEQ ID NO: 920 - DNA, 25 bp, Artificial sequence
  Oligonucleotide sequence
aaggatgcatactcaacctctgatc

SEQ ID NO: 921 - DNA, 25 bp, Artificial sequence
  Oligonucleotide sequence
aatgcagtgtttttcttgtgtgtcc

SEQ ID NO: 922 - DNA, 25 bp, Artificial sequence
  Oligonucleotide sequence
gagaccactggtcattcattacctg

SEQ ID NO: 923 - DNA, 25 bp, Artificial sequence
  Oligonucleotide sequence
gtagaatcccacttttgctttcttt

SEQ ID NO: 924 - DNA, 25 bp, Artificial sequence
  Oligonucleotide sequence
ggaagaccaatctatcaccttgagt

SEQ ID NO: 925 - DNA, 25 bp, Artificial sequence
  Oligonucleotide sequence
tgtgactgtcatcctagccttttaa

SEQ ID NO: 926 - DNA, 25 bp, Artificial sequence
  Oligonucleotide sequence
tctggtgtattttggttctcttggc

SEQ ID NO: 927 - DNA, 25 bp, Artificial sequence
  Oligonucleotide sequence
tcaagtttcatgtggcctgggtgtt

SEQ ID NO: 928 - DNA, 25 bp, Artificial sequence
  Oligonucleotide sequence
atctattttcttcaaacttctgcaa

SEQ ID NO: 929 - DNA, 25 bp, Artificial sequence
  Oligonucleotide sequence
agctgacttttttatgtgctctaaa

SEQ ID NO: 930 - DNA, 25 bp, Artificial sequence
  Oligonucleotide sequence
agctctttaatctctttataagtta

SEQ ID NO: 931 - DNA, 25 bp, Artificial sequence
  Oligonucleotide sequence
acaacagttggttagcaagctgact

SEQ ID NO: 932 - DNA, 25 bp, Artificial sequence
  Oligonucleotide sequence
aactggatctccaattgatattttc

SEQ ID NO: 933 - DNA, 25 bp, Artificial sequence
  Oligonucleotide sequence
gccagtccctgacatatcatggaaa

SEQ ID NO: 934 - DNA, 25 bp, Artificial sequence
  Oligonucleotide sequence
gacttgtttcaagctctttaatctc

SEQ ID NO: 935 - DNA, 25 bp, Artificial sequence
  Oligonucleotide sequence
gagtgctttcattttgataactgga

SEQ ID NO: 936 - DNA, 25 bp, Artificial sequence
  Oligonucleotide sequence
gtataactcatttgcagtctggaaa

SEQ ID NO: 937 - DNA, 25 bp, Artificial sequence
  Oligonucleotide sequence
ggcacaaatttctttttaagacttg

SEQ ID NO: 938 - DNA, 25 bp, Artificial sequence
  Oligonucleotide sequence
ttttttagtgccagtccctgacata

SEQ ID NO: 939 - DNA, 25 bp, Artificial sequence
  Oligonucleotide sequence
atgcctgcttagtgctttctgatta

SEQ ID NO: 940 - DNA, 25 bp, Artificial sequence
  Oligonucleotide sequence
actcgcattctgtttcttgctttaa

SEQ ID NO: 941 - DNA, 25 bp, Artificial sequence
  Oligonucleotide sequence
acacacactcatgggattccagtta

SEQ ID NO: 942 - DNA, 25 bp, Artificial sequence
  Oligonucleotide sequence
tctttgcaagtgcttttggaactaa

SEQ ID NO: 943 - DNA, 25 bp, Artificial sequence
  Oligonucleotide sequence
ccccacaatgattttctttgcaagt

SEQ ID NO: 944 - DNA, 25 bp, Artificial sequence
  Oligonucleotide sequence
gctttctgattactcgcattctgtt

SEQ ID NO: 945 - DNA, 25 bp, Artificial sequence
  Oligonucleotide sequence
gcagttctgtagtgtcatttcttat

SEQ ID NO: 946 - DNA, 25 bp, Artificial sequence
  Oligonucleotide sequence
gattccagttattacgagttgcttt

SEQ ID NO: 947 - DNA, 25 bp, Artificial sequence
  Oligonucleotide sequence
gttggatcagtattgcagttctgta

SEQ ID NO: 948 - DNA, 25 bp, Artificial sequence
  Oligonucleotide sequence
gtttaaagcctaacaccattctaat

SEQ ID NO: 949 - DNA, 25 bp, Artificial sequence
  Oligonucleotide sequence
tcttggattaactgatgcctgctta

SEQ ID NO: 950 - DNA, 25 bp, Artificial sequence
  Oligonucleotide sequence
attactcacttttcacttctatcta

SEQ ID NO: 951 - DNA, 25 bp, Artificial sequence
  Oligonucleotide sequence
agtcaactccaaattctcattcttc

SEQ ID NO: 952 - DNA, 25 bp, Artificial sequence
  Oligonucleotide sequence
agaatgactgttggaggccggccca

SEQ ID NO: 953 - DNA, 25 bp, Artificial sequence
  Oligonucleotide sequence
acatgctgtgctttggtggcctagg

SEQ ID NO: 954 - DNA, 25 bp, Artificial sequence
  Oligonucleotide sequence
aatgacccaaccctgtatttatgca

SEQ ID NO: 955 - DNA, 25 bp, Artificial sequence
  Oligonucleotide sequence
aataatcaacagtcttccctttcct

SEQ ID NO: 956 - DNA, 25 bp, Artificial sequence
  Oligonucleotide sequence
gggctataaccccaacatatcgtga

SEQ ID NO: 957 - DNA, 25 bp, Artificial sequence
  Oligonucleotide sequence
gggtgtagaccgacacagcacgcat

SEQ ID NO: 958 - DNA, 25 bp, Artificial sequence
  Oligonucleotide sequence
ggaagctcttattgggcatatctgc

SEQ ID NO: 959 - DNA, 25 bp, Artificial sequence
  Oligonucleotide sequence
tgtgggctcagcatgaagtcaactc

SEQ ID NO: 960 - DNA, 25 bp, Artificial sequence
  Oligonucleotide sequence
tgctgtggcggcattccatgtagaa

SEQ ID NO: 961 - DNA, 25 bp, Artificial sequence
  Oligonucleotide sequence
aagtctcttgggatcctgtgtagaa

SEQ ID NO: 962 - DNA, 25 bp, Artificial sequence
  Oligonucleotide sequence
aattttactgtcttgttgctttcct

SEQ ID NO: 963 - DNA, 25 bp, Artificial sequence
  Oligonucleotide sequence
gttaagtccattctctggtactagc

SEQ ID NO: 964 - DNA, 25 bp, Artificial sequence
  Oligonucleotide sequence
gcagcattgccaaataatccctaat

SEQ ID NO: 965 - DNA, 25 bp, Artificial sequence
  Oligonucleotide sequence
gttgctttccttcatctggaatgtg

SEQ ID NO: 966 - DNA, 25 bp, Artificial sequence
  Oligonucleotide sequence
ggtactagctacaattcggtttcat

SEQ ID NO: 967 - DNA, 25 bp, Artificial sequence
  Oligonucleotide sequence
ggctaccttttgttaaatctgcact

SEQ ID NO: 968 - DNA, 25 bp, Artificial sequence
  Oligonucleotide sequence
ttgcccctttttctgtaagtctctt

SEQ ID NO: 969 - DNA, 25 bp, Artificial sequence
  Oligonucleotide sequence
tatgcctcactggtggttgttctta

SEQ ID NO: 970 - DNA, 25 bp, Artificial sequence
  Oligonucleotide sequence
tttgcttaatattagggccttgccc

SEQ ID NO: 971 - DNA, 25 bp, Artificial sequence
  Oligonucleotide sequence
tttccctcacttgactttatcattg

SEQ ID NO: 972 - DNA, 25 bp, Artificial sequence
  Oligonucleotide sequence
attaagagggatcagctggctaagt

SEQ ID NO: 973 - DNA, 25 bp, Artificial sequence
  Oligonucleotide sequence
atatctttgagtgtgttcctggcag

SEQ ID NO: 974 - DNA, 25 bp, Artificial sequence
  Oligonucleotide sequence
atcttctttgatgcttttgtacttt

SEQ ID NO: 975 - DNA, 25 bp, Artificial sequence
  Oligonucleotide sequence
ttgttaaagccccagtagccacctt

SEQ ID NO: 976 - DNA, 25 bp, Artificial sequence
  Oligonucleotide sequence
aaattatgacctcttcctttaggag

SEQ ID NO: 977 - DNA, 25 bp, Artificial sequence
  Oligonucleotide sequence
aaacctctcagatactgctactgta

SEQ ID NO: 978 - DNA, 25 bp, Artificial sequence
  Oligonucleotide sequence
gctattgttccagcagttttaacgt

SEQ ID NO: 979 - DNA, 25 bp, Artificial sequence
  Oligonucleotide sequence
gaaattctccagtttttgattatta

SEQ ID NO: 980 - DNA, 25 bp, Artificial sequence
  Oligonucleotide sequence
gtagccaccttttgggcatatttga

SEQ ID NO: 981 - DNA, 25 bp, Artificial sequence
  Oligonucleotide sequence
tactaggtaacttcacattgctctg

SEQ ID NO: 982 - DNA, 25 bp, Artificial sequence
  Oligonucleotide sequence
tatacacctttattaatcgctattg

SEQ ID NO: 983 - DNA, 25 bp, Artificial sequence
  Oligonucleotide sequence
atttcccgtactcttggcattttat

SEQ ID NO: 984 - DNA, 25 bp, Artificial sequence
  Oligonucleotide sequence
gaatactcctacctcattagctagt

SEQ ID NO: 985 - DNA, 25 bp, Artificial sequence
  Oligonucleotide sequence
aagagtgtgtacatcctggcttggc

SEQ ID NO: 986 - DNA, 25 bp, Artificial sequence
  Oligonucleotide sequence
aattgtggaatacctgtctgctttg

SEQ ID NO: 987 - DNA, 25 bp, Artificial sequence
  Oligonucleotide sequence
ggagtaaacattcacgtagtcacaa

SEQ ID NO: 988 - DNA, 25 bp, Artificial sequence
  Oligonucleotide sequence
gaaattctttgcaactctcttttta

SEQ ID NO: 989 - DNA, 25 bp, Artificial sequence
  Oligonucleotide sequence
gattaacctattctacataacgtgt

SEQ ID NO: 990 - DNA, 25 bp, Artificial sequence
  Oligonucleotide sequence
gattattctcttttgttttgcttca

SEQ ID NO: 991 - DNA, 25 bp, Artificial sequence
  Oligonucleotide sequence
gtctgctttgtttggtacatcttcc

SEQ ID NO: 992 - DNA, 25 bp, Artificial sequence
  Oligonucleotide sequence
tgttttgcttcatcaatgcctaaga

SEQ ID NO: 993 - DNA, 25 bp, Artificial sequence
  Oligonucleotide sequence
tacaagcagcatttgacccatttcc

SEQ ID NO: 994 - DNA, 25 bp, Artificial sequence
  Oligonucleotide sequence
atcttcatttcctcttagctgtcag

SEQ ID NO: 995 - DNA, 25 bp, Artificial sequence
  Oligonucleotide sequence
agacagagtgtgcattccttcttgc

SEQ ID NO: 996 - DNA, 25 bp, Artificial sequence
  Oligonucleotide sequence
catcggaccaacttgtagctgacta

SEQ ID NO: 997 - DNA, 25 bp, Artificial sequence
  Oligonucleotide sequence
aatgtgcccaggctgaactgctgga

SEQ ID NO: 998 - DNA, 25 bp, Artificial sequence
  Oligonucleotide sequence
cgataagtctcgcttgttcttgcac

SEQ ID NO: 999 - DNA, 25 bp, Artificial sequence
  Oligonucleotide sequence
gaggttgtccttaatcagccatcgg

SEQ ID NO: 1000 - DNA, 25 bp, Artificial sequence
  Oligonucleotide sequence
gagggtgattcgcatcttcatttcc

SEQ ID NO: 1001 - DNA, 25 bp, Artificial sequence
  Oligonucleotide sequence
gtcacatccatgagcccagtcaaga

SEQ ID NO: 1002 - DNA, 25 bp, Artificial sequence
  Oligonucleotide sequence
gtcattccattataccagctgaggt

SEQ ID NO: 1003 - DNA, 25 bp, Artificial sequence
  Oligonucleotide sequence
tatggcttggccttgagacttgctt

SEQ ID NO: 1004 - DNA, 25 bp, Artificial sequence
  Oligonucleotide sequence
ttcttgcccgttacacgataagtct

SEQ ID NO: 1005 - DNA, 25 bp, Artificial sequence
  Oligonucleotide sequence
atgtgccagacatcacctcagatga

SEQ ID NO: 1006 - DNA, 25 bp, Artificial sequence
  Oligonucleotide sequence
agcaagccttgggacatcagcctgg

SEQ ID NO: 1007 - DNA, 25 bp, Artificial sequence
  Oligonucleotide sequence
cctggcctgtgctttactacaatga

SEQ ID NO: 1008 - DNA, 25 bp, Artificial sequence
  Oligonucleotide sequence
gccctagagggtgtccttgtgtgaa

SEQ ID NO: 1009 - DNA, 25 bp, Artificial sequence
  Oligonucleotide sequence
gaagcacacttgttatgcacctgct

SEQ ID NO: 1010 - DNA, 25 bp, Artificial sequence
  Oligonucleotide sequence
gaaagactgtttggccagcaagcct

SEQ ID NO: 1011 - DNA, 25 bp, Artificial sequence
  Oligonucleotide sequence
gagagcatccgcagtgacctggaga

SEQ ID NO: 1012 - DNA, 25 bp, Artificial sequence
  Oligonucleotide sequence
gattcttatctcatgggcactgtag

SEQ ID NO: 1013 - DNA, 25 bp, Artificial sequence
  Oligonucleotide sequence
ggattgaatgctcctgttctgagaa

SEQ ID NO: 1014 - DNA, 25 bp, Artificial sequence
  Oligonucleotide sequence
ggcactgtagccagacttagcacat

SEQ ID NO: 1015 - DNA, 25 bp, Artificial sequence
  Oligonucleotide sequence
tggagagctccgatacgcagtcaga

SEQ ID NO: 1016 - DNA, 25 bp, Artificial sequence
  Oligonucleotide sequence
atatcaacatgacccactacattcg

SEQ ID NO: 1017 - DNA, 25 bp, Artificial sequence
  Oligonucleotide sequence
atgacttgcagagcttcggcctcga

SEQ ID NO: 1018 - DNA, 25 bp, Artificial sequence
  Oligonucleotide sequence
atgacccactacattcggcacctgt

SEQ ID NO: 1019 - DNA, 25 bp, Artificial sequence
  Oligonucleotide sequence
agagcttcggcctcgacaatatcaa

SEQ ID NO: 1020 - DNA, 25 bp, Artificial sequence
  Oligonucleotide sequence
gggcattgtgaaccccctggaccgc

SEQ ID NO: 1021 - DNA, 25 bp, Artificial sequence
  Oligonucleotide sequence
acgtccatgacttgcagagcttcgg

SEQ ID NO: 1022 - DNA, 25 bp, Artificial sequence
  Oligonucleotide sequence
cttcggcctcgacaatatcaacatg

SEQ ID NO: 1023 - DNA, 25 bp, Artificial sequence
  Oligonucleotide sequence
ctacattcggcacctgtcattcggg

SEQ ID NO: 1024 - DNA, 25 bp, Artificial sequence
  Oligonucleotide sequence
gcacgtccatgacttgcagagcttc

SEQ ID NO: 1025 - DNA, 25 bp, Artificial sequence
  Oligonucleotide sequence
ggaggactacccgggcattgtgaac

SEQ ID NO: 1026 - DNA, 25 bp, Artificial sequence
  Oligonucleotide sequence
ggcctcgacaatatcaacatgaccc

SEQ ID NO: 1027 - DNA, 25 bp, Artificial sequence
  Oligonucleotide sequence
actgtgatttctttttgggtgtatt

SEQ ID NO: 1028 - DNA, 25 bp, Artificial sequence
  Oligonucleotide sequence
acatttctcatgtttgttcattcta

SEQ ID NO: 1029 - DNA, 25 bp, Artificial sequence
  Oligonucleotide sequence
aaactttctttgtactgtgatttct

SEQ ID NO: 1030 - DNA, 25 bp, Artificial sequence
  Oligonucleotide sequence
gaaaactcaaggtgctagatcccta

SEQ ID NO: 1031 - DNA, 25 bp, Artificial sequence
  Oligonucleotide sequence
gagacgtgcttttttggaaaactca

SEQ ID NO: 1032 - DNA, 25 bp, Artificial sequence
  Oligonucleotide sequence
gagacacattactaatactgtagga

SEQ ID NO: 1033 - DNA, 25 bp, Artificial sequence
  Oligonucleotide sequence
gggtgtattttgctaagtgaaactt

SEQ ID NO: 1034 - DNA, 25 bp, Artificial sequence
  Oligonucleotide sequence
gttcattctagtttattttcattta

SEQ ID NO: 1035 - DNA, 25 bp, Artificial sequence
  Oligonucleotide sequence
gtgaggccttgacttaaaactttct

SEQ ID NO: 1036 - DNA, 25 bp, Artificial sequence
  Oligonucleotide sequence
ggtgctagatccctaattcgaagag

SEQ ID NO: 1037 - DNA, 25 bp, Artificial sequence
  Oligonucleotide sequence
ttacaccacatcaccgtgaacacat

SEQ ID NO: 1038 - DNA, 25 bp, Artificial sequence
  Oligonucleotide sequence
attacctcttcagtgttttctcatg

SEQ ID NO: 1039 - DNA, 25 bp, Artificial sequence
  Oligonucleotide sequence
aaagcagttaactctagagggagct

SEQ ID NO: 1040 - DNA, 25 bp, Artificial sequence
  Oligonucleotide sequence
aacattttggtagtgtacttcagag

SEQ ID NO: 1041 - DNA, 25 bp, Artificial sequence
  Oligonucleotide sequence
gcaaactttcttctagcatgtgata

SEQ ID NO: 1042 - DNA, 25 bp, Artificial sequence
  Oligonucleotide sequence
ggacccattttgcaccatgagtttg

SEQ ID NO: 1043 - DNA, 25 bp, Artificial sequence
  Oligonucleotide sequence
ggagcatttgagttgtttcaatcaa

SEQ ID NO: 1044 - DNA, 25 bp, Artificial sequence
  Oligonucleotide sequence
tgtggatcttttacaccacatcacc

SEQ ID NO: 1045 - DNA, 25 bp, Artificial sequence
  Oligonucleotide sequence
tagagggagctgtgggacccatttt

SEQ ID NO: 1046 - DNA, 25 bp, Artificial sequence
  Oligonucleotide sequence
ttcagcttttctcaattaacatttt

SEQ ID NO: 1047 - DNA, 25 bp, Artificial sequence
  Oligonucleotide sequence
ttttctcatgcaaactttcttctag

SEQ ID NO: 1048 - DNA, 25 bp, Artificial sequence
  Oligonucleotide sequence
ttcaatcaaattttcacaggcagcc

SEQ ID NO: 1049 - DNA, 25 bp, Artificial sequence
  Oligonucleotide sequence
atatcttggcttttccttgtgtgag

SEQ ID NO: 1050 - DNA, 25 bp, Artificial sequence
  Oligonucleotide sequence
atgtttccgctcatgcttcagagta

SEQ ID NO: 1051 - DNA, 25 bp, Artificial sequence
  Oligonucleotide sequence
aggcactgcattgggtcatacttaa

SEQ ID NO: 1052 - DNA, 25 bp, Artificial sequence
  Oligonucleotide sequence
aaatctgttttgtcttctactccct

SEQ ID NO: 1053 - DNA, 25 bp, Artificial sequence
  Oligonucleotide sequence
ctaccttttacttcatgtttccgct

SEQ ID NO: 1054 - DNA, 25 bp, Artificial sequence
  Oligonucleotide sequence
gagagacctgtcaacattttgttat

SEQ ID NO: 1055 - DNA, 25 bp, Artificial sequence
  Oligonucleotide sequence
gttattgtttgctgctagtcgcttt

SEQ ID NO: 1056 - DNA, 25 bp, Artificial sequence
  Oligonucleotide sequence
gtaatccactatccagagagacctg

SEQ ID NO: 1057 - DNA, 25 bp, Artificial sequence
  Oligonucleotide sequence
gtggcatgtttccaaggcactgcat

SEQ ID NO: 1058 - DNA, 25 bp, Artificial sequence
  Oligonucleotide sequence
tgttttgtatcttctgtcagagcca

SEQ ID NO: 1059 - DNA, 25 bp, Artificial sequence
  Oligonucleotide sequence
ttcccttcccaaacatgtctatgtt

SEQ ID NO: 1060 - DNA, 25 bp, Artificial sequence
  Oligonucleotide sequence
atccatcccacagtcaactggttga

SEQ ID NO: 1061 - DNA, 25 bp, Artificial sequence
  Oligonucleotide sequence
agtttgctggccaattgcacctgct

SEQ ID NO: 1062 - DNA, 25 bp, Artificial sequence
  Oligonucleotide sequence
acctgctgtgttgttttccatccat

SEQ ID NO: 1063 - DNA, 25 bp, Artificial sequence
  Oligonucleotide sequence
aaacggtctgtgattttggaactgg

SEQ ID NO: 1064 - DNA, 25 bp, Artificial sequence
  Oligonucleotide sequence
cataccttctcatgtgcatttcagt

SEQ ID NO: 1065 - DNA, 25 bp, Artificial sequence
  Oligonucleotide sequence
gaaagacttcttagcgttccagttt

SEQ ID NO: 1066 - DNA, 25 bp, Artificial sequence
  Oligonucleotide sequence
gactgtggcacactgatgcactgaa

SEQ ID NO: 1067 - DNA, 25 bp, Artificial sequence
  Oligonucleotide sequence
gagtcatggatttctttgcttacaa

SEQ ID NO: 1068 - DNA, 25 bp, Artificial sequence
  Oligonucleotide sequence
gtaacaccatttttctttgagacta

SEQ ID NO: 1069 - DNA, 25 bp, Artificial sequence
  Oligonucleotide sequence
gtggctgcaggaattcttttctaaa

SEQ ID NO: 1070 - DNA, 25 bp, Artificial sequence
  Oligonucleotide sequence
ttatttctccccatgacttcaaaca

SEQ ID NO: 1071 - DNA, 25 bp, Artificial sequence
  Oligonucleotide sequence
acgaagtggtgtgccggtactgatc

SEQ ID NO: 1072 - DNA, 25 bp, Artificial sequence
  Oligonucleotide sequence
caacggtcatttgttttcaaggtca

SEQ ID NO: 1073 - DNA, 25 bp, Artificial sequence
  Oligonucleotide sequence
actagtgttgtagcctgttggtact

SEQ ID NO: 1074 - DNA, 25 bp, Artificial sequence
  Oligonucleotide sequence
aaggaactctctcttggtttggtca

SEQ ID NO: 1075 - DNA, 25 bp, Artificial sequence
  Oligonucleotide sequence
gttagtcatcgatttggtctcctgt

SEQ ID NO: 1076 - DNA, 25 bp, Artificial sequence
  Oligonucleotide sequence
gtacttatagtaccagtgtcctgga

SEQ ID NO: 1077 - DNA, 25 bp, Artificial sequence
  Oligonucleotide sequence
ggtcatattatttcacaacggtcat

SEQ ID NO: 1078 - DNA, 25 bp, Artificial sequence
  Oligonucleotide sequence
tgttattgttatctgctgtgctggc

SEQ ID NO: 1079 - DNA, 25 bp, Artificial sequence
  Oligonucleotide sequence
tctcctgttgcattcctggatgtat

SEQ ID NO: 1080 - DNA, 25 bp, Artificial sequence
  Oligonucleotide sequence
tccccttcgttactgtggtatgtta

SEQ ID NO: 1081 - DNA, 25 bp, Artificial sequence
  Oligonucleotide sequence
tagacgctccgcttacgaagtggtg

SEQ ID NO: 1082 - DNA, 25 bp, Artificial sequence
  Oligonucleotide sequence
gcgctgtaagcctctgaaggaattt

SEQ ID NO: 1083 - DNA, 25 bp, Artificial sequence
  Oligonucleotide sequence
gaatttatgctttctcaagatgctg

SEQ ID NO: 1084 - DNA, 25 bp, Artificial sequence
  Oligonucleotide sequence
gaccgattggactgggatgaacata

SEQ ID NO: 1085 - DNA, 25 bp, Artificial sequence
  Oligonucleotide sequence
gatgctgaacatgagctgctctttg

SEQ ID NO: 1086 - DNA, 25 bp, Artificial sequence
  Oligonucleotide sequence
gtattgccgtgtttattttgcttaa

SEQ ID NO: 1087 - DNA, 25 bp, Artificial sequence
  Oligonucleotide sequence
gtaaatatttccatcatgaccgatt

SEQ ID NO: 1088 - DNA, 25 bp, Artificial sequence
  Oligonucleotide sequence
gggtttacagtatttccaacacatg

SEQ ID NO: 1089 - DNA, 25 bp, Artificial sequence
  Oligonucleotide sequence
ggagatatgtttcaaggcgctgtaa

SEQ ID NO: 1090 - DNA, 25 bp, Artificial sequence
  Oligonucleotide sequence
tgagctgctctttgacctcattgag

SEQ ID NO: 1091 - DNA, 25 bp, Artificial sequence
  Oligonucleotide sequence
tcccaaccatgtgatgtctggagta

SEQ ID NO: 1092 - DNA, 25 bp, Artificial sequence
  Oligonucleotide sequence
taaagcatcctttcttttaccctct

SEQ ID NO: 1093 - DNA, 25 bp, Artificial sequence
  Oligonucleotide sequence
atcttccggcgcgaccaagggaaag

SEQ ID NO: 1094 - DNA, 25 bp, Artificial sequence
  Oligonucleotide sequence
atctgctgccgtgaggacctgaact

SEQ ID NO: 1095 - DNA, 25 bp, Artificial sequence
  Oligonucleotide sequence
atgccagaggcctacaactttgatt

SEQ ID NO: 1096 - DNA, 25 bp, Artificial sequence
  Oligonucleotide sequence
agtcctggaggctgctacgatacga

SEQ ID NO: 1097 - DNA, 25 bp, Artificial sequence
  Oligonucleotide sequence
acagcctatgccattagtggtccca

SEQ ID NO: 1098 - DNA, 25 bp, Artificial sequence
  Oligonucleotide sequence
agctgggtttggacttctcttatga

SEQ ID NO: 1099 - DNA, 25 bp, Artificial sequence
  Oligonucleotide sequence
accggttcaacaaaactctccatga

SEQ ID NO: 1100 - DNA, 25 bp, Artificial sequence
  Oligonucleotide sequence
aaatctacaactggagtggctaccc

SEQ ID NO: 1101 - DNA, 25 bp, Artificial sequence
  Oligonucleotide sequence
gtggctacccaatgctggttcagaa

SEQ ID NO: 1102 - DNA, 25 bp, Artificial sequence
  Oligonucleotide sequence
gtggtctccctgtttttcactggaa

SEQ ID NO: 1103 - DNA, 25 bp, Artificial sequence
  Oligonucleotide sequence
ttctcttatgatctggctccacgag

SEQ ID NO: 1104 - DNA, 25 bp, Artificial sequence
  Oligonucleotide sequence
tttcgactggcgcaacgtttggtaa

SEQ ID NO: 1105 - DNA, 25 bp, Artificial sequence
  Oligonucleotide sequence
ataacttttgtaccgtgccctctat

SEQ ID NO: 1106 - DNA, 25 bp, Artificial sequence
  Oligonucleotide sequence
agtggttaaggcttcctatccagaa

SEQ ID NO: 1107 - DNA, 25 bp, Artificial sequence
  Oligonucleotide sequence
agcccagcttcctgagtaccaataa

SEQ ID NO: 1108 - DNA, 25 bp, Artificial sequence
  Oligonucleotide sequence
cagtgactgacccatatgtagcaaa

SEQ ID NO: 1109 - DNA, 25 bp, Artificial sequence
  Oligonucleotide sequence
gcctgcagcgtgagaagacttccca

SEQ ID NO: 1110 - DNA, 25 bp, Artificial sequence
  Oligonucleotide sequence
gctgctcactcactgtgggatgtta

SEQ ID NO: 1111 - DNA, 25 bp, Artificial sequence
  Oligonucleotide sequence
gataatacccactttctaggattgt

SEQ ID NO: 1112 - DNA, 25 bp, Artificial sequence
  Oligonucleotide sequence
gatgttatgaaagcgacccttccaa

SEQ ID NO: 1113 - DNA, 25 bp, Artificial sequence
  Oligonucleotide sequence
taacgtttgaccctgaggcccagag

SEQ ID NO: 1114 - DNA, 25 bp, Artificial sequence
  Oligonucleotide sequence
ttccttctggatcgtttctccaaga

SEQ ID NO: 1115 - DNA, 25 bp, Artificial sequence
  Oligonucleotide sequence
ataaaactgtccttttcactccatg

SEQ ID NO: 1116 - DNA, 25 bp, Artificial sequence
  Oligonucleotide sequence
aggtttttatgctcgagatctttcg

SEQ ID NO: 1117 - DNA, 25 bp, Artificial sequence
  Oligonucleotide sequence
acagatctgctgtagacttgttttt

SEQ ID NO: 1118 - DNA, 25 bp, Artificial sequence
  Oligonucleotide sequence
gtatattggaactcctgcagcttcg

SEQ ID NO: 1119 - DNA, 25 bp, Artificial sequence
  Oligonucleotide sequence
tggcttaactcgctgtttgcgtata

SEQ ID NO: 1120 - DNA, 25 bp, Artificial sequence
  Oligonucleotide sequence
ggccttgtaagtcttttgaccattc

SEQ ID NO: 1121 - DNA, 25 bp, Artificial sequence
  Oligonucleotide sequence
tgctcttgcgctagtgaaatggtct

SEQ ID NO: 1122 - DNA, 25 bp, Artificial sequence
  Oligonucleotide sequence
tttgcaactgttgacccttttatgt

SEQ ID NO: 1123 - DNA, 25 bp, Artificial sequence
  Oligonucleotide sequence
tgcatcgttcattcctataagctct

SEQ ID NO: 1124 - DNA, 25 bp, Artificial sequence
  Oligonucleotide sequence
tatttgctttgcctgagctcagatc

SEQ ID NO: 1125 - DNA, 25 bp, Artificial sequence
  Oligonucleotide sequence
tatcattttgtttgttctggcttaa

SEQ ID NO: 1126 - DNA, 25 bp, Artificial sequence
  Oligonucleotide sequence
attcacaatttgcacctctatcatg

SEQ ID NO: 1127 - DNA, 25 bp, Artificial sequence
  Oligonucleotide sequence
aggctacttgttactgtttcttcat

SEQ ID NO: 1128 - DNA, 25 bp, Artificial sequence
  Oligonucleotide sequence
acaagctatcctatgccttcaaata

SEQ ID NO: 1129 - DNA, 25 bp, Artificial sequence
  Oligonucleotide sequence
aatgttttaatactagggcctgctg

SEQ ID NO: 1130 - DNA, 25 bp, Artificial sequence
  Oligonucleotide sequence
aatccatgccccactattaacaatg

SEQ ID NO: 1131 - DNA, 25 bp, Artificial sequence
  Oligonucleotide sequence
aattggcacctctaccttgagcaga

SEQ ID NO: 1132 - DNA, 25 bp, Artificial sequence
  Oligonucleotide sequence
gctgagttgctttctcttgtggaga

SEQ ID NO: 1133 - DNA, 25 bp, Artificial sequence
  Oligonucleotide sequence
gcaattgcctatctgtttattctgg

SEQ ID NO: 1134 - DNA, 25 bp, Artificial sequence
  Oligonucleotide sequence
gttaaactgtaccttttgcgattca

SEQ ID NO: 1135 - DNA, 25 bp, Artificial sequence
  Oligonucleotide sequence
gtttcttcatgcactacttactgtt

SEQ ID NO: 1136 - DNA, 25 bp, Artificial sequence
  Oligonucleotide sequence
gtctgtccaactctgtatttaggct

SEQ ID NO: 1137 - DNA, 25 bp, Artificial sequence
  Oligonucleotide sequence
atcaatccagcaatctgagcgcttc

SEQ ID NO: 1138 - DNA, 25 bp, Artificial sequence
  Oligonucleotide sequence
agggcttatgctatttcctgtttct

SEQ ID NO: 1139 - DNA, 25 bp, Artificial sequence
  Oligonucleotide sequence
agcatcatgtctcacttgggttact

SEQ ID NO: 1140 - DNA, 25 bp, Artificial sequence
  Oligonucleotide sequence
gaattctacttctgcctagggctta

SEQ ID NO: 1141 - DNA, 25 bp, Artificial sequence
  Oligonucleotide sequence
gaggtctccttgatcctttagtata

SEQ ID NO: 1142 - DNA, 25 bp, Artificial sequence
  Oligonucleotide sequence
ggaacgttctactaggcgctacatg

SEQ ID NO: 1143 - DNA, 25 bp, Artificial sequence
  Oligonucleotide sequence
tgagcgcttctcaggactgtactac

SEQ ID NO: 1144 - DNA, 25 bp, Artificial sequence
  Oligonucleotide sequence
taagatgtgtgttgtctctttccct

SEQ ID NO: 1145 - DNA, 25 bp, Artificial sequence
  Oligonucleotide sequence
tatgatctttcctcaagtgtcacct

SEQ ID NO: 1146 - DNA, 25 bp, Artificial sequence
  Oligonucleotide sequence
ttccttgcttcctttaacacacgaa

SEQ ID NO: 1147 - DNA, 25 bp, Artificial sequence
  Oligonucleotide sequence
ttgggttactgcagtagctccctga

SEQ ID NO: 1148 - DNA, 25 bp, Artificial sequence
  Oligonucleotide sequence
attagttatccatactctcatgaca

SEQ ID NO: 1149 - DNA, 25 bp, Artificial sequence
  Oligonucleotide sequence
atatccattctgtattttacgtgca

SEQ ID NO: 1150 - DNA, 25 bp, Artificial sequence
  Oligonucleotide sequence
catactctcatgacaattttgttgg

SEQ ID NO: 1151 - DNA, 25 bp, Artificial sequence
  Oligonucleotide sequence
ctgatatcttaacagcttacctaga

SEQ ID NO: 1152 - DNA, 25 bp, Artificial sequence
  Oligonucleotide sequence
gcagaattatcttccgtagggtttt

SEQ ID NO: 1153 - DNA, 25 bp, Artificial sequence
  Oligonucleotide sequence
gtgcagaaactgcatgtaattctaa

SEQ ID NO: 1154 - DNA, 25 bp, Artificial sequence
  Oligonucleotide sequence
ttacgtgcagcagaattatcttccg

SEQ ID NO: 1155 - DNA, 25 bp, Artificial sequence
  Oligonucleotide sequence
gtgttcacattcgtcacaaagttgt

SEQ ID NO: 1156 - DNA, 25 bp, Artificial sequence
  Oligonucleotide sequence
ggctcttatttctaatgtgttcaca

SEQ ID NO: 1157 - DNA, 25 bp, Artificial sequence
  Oligonucleotide sequence
ttctaagttttactcctaacataag

SEQ ID NO: 1158 - DNA, 25 bp, Artificial sequence
  Oligonucleotide sequence
ttctattctatacttgccaatgtgg

SEQ ID NO: 1159 - DNA, 25 bp, Artificial sequence
  Oligonucleotide sequence
atgtgtgtactgtatctgcctttcc

SEQ ID NO: 1160 - DNA, 25 bp, Artificial sequence
  Oligonucleotide sequence
agttgtgcagtttttcttttcagaa

SEQ ID NO: 1161 - DNA, 25 bp, Artificial sequence
  Oligonucleotide sequence
actgcctgcttttttgacctttgtt

SEQ ID NO: 1162 - DNA, 25 bp, Artificial sequence
  Oligonucleotide sequence
actgattactgtgtcttgctcttcg

SEQ ID NO: 1163 - DNA, 25 bp, Artificial sequence
  Oligonucleotide sequence
aacagtgatcctagggctgaccgca

SEQ ID NO: 1164 - DNA, 25 bp, Artificial sequence
  Oligonucleotide sequence
gcagcctcttttgcatagtcatgta

SEQ ID NO: 1165 - DNA, 25 bp, Artificial sequence
  Oligonucleotide sequence
ggattcagtcttgtcttttgtctag

SEQ ID NO: 1166 - DNA, 25 bp, Artificial sequence
  Oligonucleotide sequence
tgttcatacaatgtggcagcctctt

SEQ ID NO: 1167 - DNA, 25 bp, Artificial sequence
  Oligonucleotide sequence
tgcctttccaccacatttttatgac

SEQ ID NO: 1168 - DNA, 25 bp, Artificial sequence
  Oligonucleotide sequence
ttatgacactgtattccactgcctg

SEQ ID NO: 1169 - DNA, 25 bp, Artificial sequence
  Oligonucleotide sequence
ttgttccctcggatttgtcctataa

SEQ ID NO: 1170 - DNA, 25 bp, Artificial sequence
  Oligonucleotide sequence
atgcccatggaacattctctaggat

SEQ ID NO: 1171 - DNA, 25 bp, Artificial sequence
  Oligonucleotide sequence
aggattgatcacatattaggccaca

SEQ ID NO: 1172 - DNA, 25 bp, Artificial sequence
  Oligonucleotide sequence
agaacattccatccaaaaaccacag

SEQ ID NO: 1173 - DNA, 25 bp, Artificial sequence
  Oligonucleotide sequence
acacattctttttacatgcccatgg

SEQ ID NO: 1174 - DNA, 25 bp, Artificial sequence
  Oligonucleotide sequence
aataccatgcagcttttctgaccac

SEQ ID NO: 1175 - DNA, 25 bp, Artificial sequence
  Oligonucleotide sequence
aatatctatgcacccaacacaggag

SEQ ID NO: 1176 - DNA, 25 bp, Artificial sequence
  Oligonucleotide sequence
gcagcttttctgaccacaaaggtat

SEQ ID NO: 1177 - DNA, 25 bp, Artificial sequence
  Oligonucleotide sequence
taagagacaaagacgggcactacat

SEQ ID NO: 1178 - DNA, 25 bp, Artificial sequence
  Oligonucleotide sequence
gaaacactcgcctgaaaggacacat

SEQ ID NO: 1179 - DNA, 25 bp, Artificial sequence
  Oligonucleotide sequence
tttaacactccacttacaccaatgg

SEQ ID NO: 1180 - DNA, 25 bp, Artificial sequence
  Oligonucleotide sequence
ttaggccacaaaacaagtctcaata

SEQ ID NO: 1181 - DNA, 25 bp, Artificial sequence
  Oligonucleotide sequence
atatttctgattggtgcctttccac

SEQ ID NO: 1182 - DNA, 25 bp, Artificial sequence
  Oligonucleotide sequence
agttggttatagtcttctgttctga

SEQ ID NO: 1183 - DNA, 25 bp, Artificial sequence
  Oligonucleotide sequence
caaccagctcggacatttgtgtttt

SEQ ID NO: 1184 - DNA, 25 bp, Artificial sequence
  Oligonucleotide sequence
cataagccgtttttctgtttaatgg

SEQ ID NO: 1185 - DNA, 25 bp, Artificial sequence
  Oligonucleotide sequence
gcctttccactttttagcagcaatg

SEQ ID NO: 1186 - DNA, 25 bp, Artificial sequence
  Oligonucleotide sequence
gatgttttcgttcccaaatgtgact

SEQ ID NO: 1187 - DNA, 25 bp, Artificial sequence
  Oligonucleotide sequence
gttatctgctttccttcatttttga

SEQ ID NO: 1188 - DNA, 25 bp, Artificial sequence
  Oligonucleotide sequence
tgtcataaaccccatcataagccgt

SEQ ID NO: 1189 - DNA, 25 bp, Artificial sequence
  Oligonucleotide sequence
tgaaattctttcatgtcctttccct

SEQ ID NO: 1190 - DNA, 25 bp, Artificial sequence
  Oligonucleotide sequence
tttcactcatgccaaaacaaccagc

SEQ ID NO: 1191 - DNA, 25 bp, Artificial sequence
  Oligonucleotide sequence
tttgagcctgttattcgacaccatc

SEQ ID NO: 1192 - DNA, 25 bp, Artificial sequence
  Oligonucleotide sequence
agggcctcttctctgtttgtttcag

SEQ ID NO: 1193 - DNA, 25 bp, Artificial sequence
  Oligonucleotide sequence
agtgtgacatgggttcttctgaaga

SEQ ID NO: 1194 - DNA, 25 bp, Artificial sequence
  Oligonucleotide sequence
agacatctgctacctctcgtaggat

SEQ ID NO: 1195 - DNA, 25 bp, Artificial sequence
  Oligonucleotide sequence
aaaacccagtattcagcacatgtcc

SEQ ID NO: 1196 - DNA, 25 bp, Artificial sequence
  Oligonucleotide sequence
ctccgagaattggttgctgtttaga

SEQ ID NO: 1197 - DNA, 25 bp, Artificial sequence
  Oligonucleotide sequence
gaaggatgcgataagccgttgcccc

SEQ ID NO: 1198 - DNA, 25 bp, Artificial sequence
  Oligonucleotide sequence
tgcacctggagcttgagagggcctc

SEQ ID NO: 1199 - DNA, 25 bp, Artificial sequence
  Oligonucleotide sequence
gattgccccgtaattctaaatttag

SEQ ID NO: 1200 - DNA, 25 bp, Artificial sequence
  Oligonucleotide sequence
gttgtgttccaaagtcctgaagcca

SEQ ID NO: 1201 - DNA, 25 bp, Artificial sequence
  Oligonucleotide sequence
tggaaagcatcttgtatctcctccc

SEQ ID NO: 1202 - DNA, 25 bp, Artificial sequence
  Oligonucleotide sequence
tgaagccagagcctgcgccagacat

SEQ ID NO: 1203 - DNA, 25 bp, Artificial sequence
  Oligonucleotide sequence
actgtgttcagcctcaaagtctgca

SEQ ID NO: 1204 - DNA, 25 bp, Artificial sequence
  Oligonucleotide sequence
ctcatagtcggcatattcttcggta

SEQ ID NO: 1205 - DNA, 25 bp, Artificial sequence
  Oligonucleotide sequence
cttcgttctctggatttgtctgtat

SEQ ID NO: 1206 - DNA, 25 bp, Artificial sequence
  Oligonucleotide sequence
ctggtttcctccaatgaactgctta

SEQ ID NO: 1207 - DNA, 25 bp, Artificial sequence
  Oligonucleotide sequence
gcttacagccccagcaagagaggaa

SEQ ID NO: 1208 - DNA, 25 bp, Artificial sequence
  Oligonucleotide sequence
gcaattcctctgttatttcctaata

SEQ ID NO: 1209 - DNA, 25 bp, Artificial sequence
  Oligonucleotide sequence
gtatgatcttctttattgtacccat

SEQ ID NO: 1210 - DNA, 25 bp, Artificial sequence
  Oligonucleotide sequence
gtgattatccatttacatccccaac

SEQ ID NO: 1211 - DNA, 25 bp, Artificial sequence
  Oligonucleotide sequence
tacatccccaacaaggcaactgtgt

SEQ ID NO: 1212 - DNA, 25 bp, Artificial sequence
  Oligonucleotide sequence
tagtttccacgtcccaaattgcaat

SEQ ID NO: 1213 - DNA, 25 bp, Artificial sequence
  Oligonucleotide sequence
ttgtacccatcattatttcctgttg

SEQ ID NO: 1214 - DNA, 25 bp, Artificial sequence
  Oligonucleotide sequence
attaaatacatttctcccatgccac

SEQ ID NO: 1215 - DNA, 25 bp, Artificial sequence
  Oligonucleotide sequence
aggatagatttcagctcccaggatc

SEQ ID NO: 1216 - DNA, 25 bp, Artificial sequence
  Oligonucleotide sequence
agtgttggacttcttaatgatcata

SEQ ID NO: 1217 - DNA, 25 bp, Artificial sequence
  Oligonucleotide sequence
agctcccaggatcccaattttaatt

SEQ ID NO: 1218 - DNA, 25 bp, Artificial sequence
  Oligonucleotide sequence
aatttctgtattcaccaagcccaag

SEQ ID NO: 1219 - DNA, 25 bp, Artificial sequence
  Oligonucleotide sequence
gacattcttgtgatttcatatgctg

SEQ ID NO: 1220 - DNA, 25 bp, Artificial sequence
  Oligonucleotide sequence
gttcgaagcctggtgacttttcatt

SEQ ID NO: 1221 - DNA, 25 bp, Artificial sequence
  Oligonucleotide sequence
gtaatctaaattcctgtgtcagttg

SEQ ID NO: 1222 - DNA, 25 bp, Artificial sequence
  Oligonucleotide sequence
gtactgtaacatccttatactttat

SEQ ID NO: 1223 - DNA, 25 bp, Artificial sequence
  Oligonucleotide sequence
gtgttggcttttctaatttgtactg

SEQ ID NO: 1224 - DNA, 25 bp, Artificial sequence
  Oligonucleotide sequence
gtgtcagttgccaaatcacttaaat

SEQ ID NO: 1225 - DNA, 25 bp, Artificial sequence
  Oligonucleotide sequence
atgacatgagccttatagactgtaa

SEQ ID NO: 1226 - DNA, 25 bp, Artificial sequence
  Oligonucleotide sequence
agtccattgccagcagtgggcaggc

SEQ ID NO: 1227 - DNA, 25 bp, Artificial sequence
  Oligonucleotide sequence
aattacttcattttaacatccactg

SEQ ID NO: 1228 - DNA, 25 bp, Artificial sequence
  Oligonucleotide sequence
caccttattaactgtgaggtcataa

SEQ ID NO: 1229 - DNA, 25 bp, Artificial sequence
  Oligonucleotide sequence
gcaggcctggcattattggcacaga

SEQ ID NO: 1230 - DNA, 25 bp, Artificial sequence
  Oligonucleotide sequence
gagcattaactgtgcaccttattaa

SEQ ID NO: 1231 - DNA, 25 bp, Artificial sequence
  Oligonucleotide sequence
gatctctttggtgctgaactatgac

SEQ ID NO: 1232 - DNA, 25 bp, Artificial sequence
  Oligonucleotide sequence
gggtgtcaggaaatgggtattctca

SEQ ID NO: 1233 - DNA, 25 bp, Artificial sequence
  Oligonucleotide sequence
ggtattctcaaagtccattgccagc

SEQ ID NO: 1234 - DNA, 25 bp, Artificial sequence
  Oligonucleotide sequence
taaagcattttctccgactttcacc

SEQ ID NO: 1235 - DNA, 25 bp, Artificial sequence
  Oligonucleotide sequence
tagacagttttgtagatctctttgg

SEQ ID NO: 1236 - DNA, 25 bp, Artificial sequence
  Oligonucleotide sequence
aatcagatctttgcagctttgaggg

SEQ ID NO: 1237 - DNA, 25 bp, Artificial sequence
  Oligonucleotide sequence
aatttggttggcattttcttcatga

SEQ ID NO: 1238 - DNA, 25 bp, Artificial sequence
  Oligonucleotide sequence
cttttgtgttggctctaactctgaa

SEQ ID NO: 1239 - DNA, 25 bp, Artificial sequence
  Oligonucleotide sequence
cctcctcatctttaaaccacgtatt

SEQ ID NO: 1240 - DNA, 25 bp, Artificial sequence
  Oligonucleotide sequence
gagcatcattcttttgtctccatgg

SEQ ID NO: 1241 - DNA, 25 bp, Artificial sequence
  Oligonucleotide sequence
gtttcctcacttttatttgccttag

SEQ ID NO: 1242 - DNA, 25 bp, Artificial sequence
  Oligonucleotide sequence
gtctccatggttacttgtgtgatac

SEQ ID NO: 1243 - DNA, 25 bp, Artificial sequence
  Oligonucleotide sequence
gtggtcttgtcttaacttttgtgtt

SEQ ID NO: 1244 - DNA, 25 bp, Artificial sequence
  Oligonucleotide sequence
ggagtatctgttgcccattactata

SEQ ID NO: 1245 - DNA, 25 bp, Artificial sequence
  Oligonucleotide sequence
tactgttttttctaatctcccttgt

SEQ ID NO: 1246 - DNA, 25 bp, Artificial sequence
  Oligonucleotide sequence
tttaatctaagcattttcccctcct

SEQ ID NO: 1247 - DNA, 25 bp, Artificial sequence
  Oligonucleotide sequence
gaaacaaccaggagcccgtacggag

SEQ ID NO: 1248 - DNA, 25 bp, Artificial sequence
  Oligonucleotide sequence
atatcagctgcctagaatccggacg

SEQ ID NO: 1249 - DNA, 25 bp, Artificial sequence
  Oligonucleotide sequence
acatcgacacttccttctagagaga

SEQ ID NO: 1250 - DNA, 25 bp, Artificial sequence
  Oligonucleotide sequence
gacgcggtctaaccctgttgagaaa

SEQ ID NO: 1251 - DNA, 25 bp, Artificial sequence
  Oligonucleotide sequence
gggaaaatctgacttactcctttgt

SEQ ID NO: 1252 - DNA, 25 bp, Artificial sequence
  Oligonucleotide sequence
ggaagctacactgaagaccgaggtt

SEQ ID NO: 1253 - DNA, 25 bp, Artificial sequence
  Oligonucleotide sequence
ggacctacccaagcttttgtaagtg

SEQ ID NO: 1254 - DNA, 25 bp, Artificial sequence
  Oligonucleotide sequence
ggcaatattggttgggtccctgcag

SEQ ID NO: 1255 - DNA, 25 bp, Artificial sequence
  Oligonucleotide sequence
tccacccacggactttgagaaacaa

SEQ ID NO: 1256 - DNA, 25 bp, Artificial sequence
  Oligonucleotide sequence
tgcgcgagcagagcccacgaataga

SEQ ID NO: 1257 - DNA, 25 bp, Artificial sequence
  Oligonucleotide sequence
tagagagacccaaccattctttcca

SEQ ID NO: 1258 - DNA, 25 bp, Artificial sequence
  Oligonucleotide sequence
cttgacgctcaaattcaggactgaa

SEQ ID NO: 1259 - DNA, 25 bp, Artificial sequence
  Oligonucleotide sequence
atatcctttcttcttttttccatct

SEQ ID NO: 1260 - DNA, 25 bp, Artificial sequence
  Oligonucleotide sequence
cagtattgtaaatgtgtgcccctta

SEQ ID NO: 1261 - DNA, 25 bp, Artificial sequence
  Oligonucleotide sequence
cgtattgctgcttggttttcttttt

SEQ ID NO: 1262 - DNA, 25 bp, Artificial sequence
  Oligonucleotide sequence
gcgggtgcattctagatatcattct

SEQ ID NO: 1263 - DNA, 25 bp, Artificial sequence
  Oligonucleotide sequence
gagactcacagagcgggtgcattct

SEQ ID NO: 1264 - DNA, 25 bp, Artificial sequence
  Oligonucleotide sequence
gatagattttcttttgctttactgc

SEQ ID NO: 1265 - DNA, 25 bp, Artificial sequence
  Oligonucleotide sequence
gttattttgcttttcttgacgctca

SEQ ID NO: 1266 - DNA, 25 bp, Artificial sequence
  Oligonucleotide sequence
gtactcttacttttggtagtgtcag

SEQ ID NO: 1267 - DNA, 25 bp, Artificial sequence
  Oligonucleotide sequence
gtgtgccccttatacagtactctta

SEQ ID NO: 1268 - DNA, 25 bp, Artificial sequence
  Oligonucleotide sequence
ttttccatctactgtggcttttcag

SEQ ID NO: 1269 - DNA, 25 bp, Artificial sequence
  Oligonucleotide sequence
agctcaggcccgatctgcttgggaa

SEQ ID NO: 1270 - DNA, 25 bp, Artificial sequence
  Oligonucleotide sequence
agcccatctctctgaagggatttat

SEQ ID NO: 1271 - DNA, 25 bp, Artificial sequence
  Oligonucleotide sequence
aattcctggctctctttatgttctg

SEQ ID NO: 1272 - DNA, 25 bp, Artificial sequence
  Oligonucleotide sequence
gccgcttactgctgcgtgaactaat

SEQ ID NO: 1273 - DNA, 25 bp, Artificial sequence
  Oligonucleotide sequence
gaattgcaggaaagcccatctctct

SEQ ID NO: 1274 - DNA, 25 bp, Artificial sequence
  Oligonucleotide sequence
gaaggtggcattccatcagcagaag

SEQ ID NO: 1275 - DNA, 25 bp, Artificial sequence
  Oligonucleotide sequence
gtagccatctattcagcctatatca

SEQ ID NO: 1276 - DNA, 25 bp, Artificial sequence
  Oligonucleotide sequence
gtgaactaatcttttccacctctct

SEQ ID NO: 1277 - DNA, 25 bp, Artificial sequence
  Oligonucleotide sequence
tggtgtgggaccctgagactacact

SEQ ID NO: 1278 - DNA, 25 bp, Artificial sequence
  Oligonucleotide sequence
tcatgatatcctctaatccttccaa

SEQ ID NO: 1279 - DNA, 25 bp, Artificial sequence
  Oligonucleotide sequence
ttaattctgtgctctctctatatgg

SEQ ID NO: 1280 - DNA, 25 bp, Artificial sequence
  Oligonucleotide sequence
agcctccactttctctgatgtgttg

SEQ ID NO: 1281 - DNA, 25 bp, Artificial sequence
  Oligonucleotide sequence
agccgacgctgttacacttgatatt

SEQ ID NO: 1282 - DNA, 25 bp, Artificial sequence
  Oligonucleotide sequence
actaggatttatctgcagggttgca

SEQ ID NO: 1283 - DNA, 25 bp, Artificial sequence
  Oligonucleotide sequence
aatctgttttccctcatttctttct

SEQ ID NO: 1284 - DNA, 25 bp, Artificial sequence
  Oligonucleotide sequence
gaatcctgcctgaaatagactcaaa

SEQ ID NO: 1285 - DNA, 25 bp, Artificial sequence
  Oligonucleotide sequence
gagctccagttttatgggtttagtc

SEQ ID NO: 1286 - DNA, 25 bp, Artificial sequence
  Oligonucleotide sequence
gatgtgttggttcagttttctttta

SEQ ID NO: 1287 - DNA, 25 bp, Artificial sequence
  Oligonucleotide sequence
gtgcctttatttttatgagctccag

SEQ ID NO: 1288 - DNA, 25 bp, Artificial sequence
  Oligonucleotide sequence
gggcttatctgtatatctgaactct

SEQ ID NO: 1289 - DNA, 25 bp, Artificial sequence
  Oligonucleotide sequence
ttgaaatcatgctgctgagcctcca

SEQ ID NO: 1290 - DNA, 25 bp, Artificial sequence
  Oligonucleotide sequence
ttgctgcccacatggtgcctttatt

SEQ ID NO: 1291 - DNA, 25 bp, Artificial sequence
  Oligonucleotide sequence
agaggatctctcttttgaaaagcta

SEQ ID NO: 1292 - DNA, 25 bp, Artificial sequence
  Oligonucleotide sequence
aagaacacttacagctcatatacag

SEQ ID NO: 1293 - DNA, 25 bp, Artificial sequence
  Oligonucleotide sequence
aaggagtttcctgtggtttctgccg

SEQ ID NO: 1294 - DNA, 25 bp, Artificial sequence
  Oligonucleotide sequence
cgactattactttctctcaagtgcc

SEQ ID NO: 1295 - DNA, 25 bp, Artificial sequence
  Oligonucleotide sequence
gaatatgttctcctttgtagcctct

SEQ ID NO: 1296 - DNA, 25 bp, Artificial sequence
  Oligonucleotide sequence
gaaaaacacagcttagccccttcct

SEQ ID NO: 1297 - DNA, 25 bp, Artificial sequence
  Oligonucleotide sequence
gtagaatgacaccaaagctgcaact

SEQ ID NO: 1298 - DNA, 25 bp, Artificial sequence
  Oligonucleotide sequence
ggaaatcagtcagtaccatcgttaa

SEQ ID NO: 1299 - DNA, 25 bp, Artificial sequence
  Oligonucleotide sequence
ttgtagcctcttgacaaagcaggaa

SEQ ID NO: 1300 - DNA, 25 bp, Artificial sequence
  Oligonucleotide sequence
ttgtccactgaaactttgctaacgt

SEQ ID NO: 1301 - DNA, 25 bp, Artificial sequence
  Oligonucleotide sequence
ttcctctagccttcagtcaattttt

SEQ ID NO: 1302 - DNA, 25 bp, Artificial sequence
  Oligonucleotide sequence
agtaaattgacagtggagctccatt

SEQ ID NO: 1303 - DNA, 25 bp, Artificial sequence
  Oligonucleotide sequence
aggcatgtacactttgatatagcag

SEQ ID NO: 1304 - DNA, 25 bp, Artificial sequence
  Oligonucleotide sequence
aatgcctggcccatgttacatagaa

SEQ ID NO: 1305 - DNA, 25 bp, Artificial sequence
  Oligonucleotide sequence
cagtggagctccattttacaaatgt

SEQ ID NO: 1306 - DNA, 25 bp, Artificial sequence
  Oligonucleotide sequence
gttcaggcattgctttaaacgatga

SEQ ID NO: 1307 - DNA, 25 bp, Artificial sequence
  Oligonucleotide sequence
gaatacgtctggaatgatccattag

SEQ ID NO: 1308 - DNA, 25 bp, Artificial sequence
  Oligonucleotide sequence
gatatagcaggttcaccttaggaaa

SEQ ID NO: 1309 - DNA, 25 bp, Artificial sequence
  Oligonucleotide sequence
gtgcagtcttacatgtgtacacata

SEQ ID NO: 1310 - DNA, 25 bp, Artificial sequence
  Oligonucleotide sequence
ggaagactatgtagccagcaagtaa

SEQ ID NO: 1311 - DNA, 25 bp, Artificial sequence
  Oligonucleotide sequence
tgaatttaacacatccatatactgg

SEQ ID NO: 1312 - DNA, 25 bp, Artificial sequence
  Oligonucleotide sequence
tagagggtatcaatgcctggcccat

SEQ ID NO: 1313 - DNA, 25 bp, Artificial sequence
  Oligonucleotide sequence
ttcccaaagggacttcagcgagttg

SEQ ID NO: 1314 - DNA, 25 bp, Artificial sequence
  Oligonucleotide sequence
actgagcctgcggttgcacagaagt

SEQ ID NO: 1315 - DNA, 25 bp, Artificial sequence
  Oligonucleotide sequence
gaaaccagctacagtatggcccact

SEQ ID NO: 1316 - DNA, 25 bp, Artificial sequence
  Oligonucleotide sequence
gcttattttgaagctggcgccctcc

SEQ ID NO: 1317 - DNA, 25 bp, Artificial sequence
  Oligonucleotide sequence
ccctccattgtgtgttttaagtctt

SEQ ID NO: 1318 - DNA, 25 bp, Artificial sequence
  Oligonucleotide sequence
gaaaagcttgtcacagtctaactgg

SEQ ID NO: 1319 - DNA, 25 bp, Artificial sequence
  Oligonucleotide sequence
gagacgaggttggtgccgcttattt

SEQ ID NO: 1320 - DNA, 25 bp, Artificial sequence
  Oligonucleotide sequence
gagaggaaatgtacactcactgtaa

SEQ ID NO: 1321 - DNA, 25 bp, Artificial sequence
  Oligonucleotide sequence
gatttgctttttacacactttcatg

SEQ ID NO: 1322 - DNA, 25 bp, Artificial sequence
  Oligonucleotide sequence
gtattatttatttaaccctccattg

SEQ ID NO: 1323 - DNA, 25 bp, Artificial sequence
  Oligonucleotide sequence
ggaccgagagagactcaccctgcag

SEQ ID NO: 1324 - DNA, 25 bp, Artificial sequence
  Oligonucleotide sequence
atagaactcttcacgtcgactgcat

SEQ ID NO: 1325 - DNA, 25 bp, Artificial sequence
  Oligonucleotide sequence
aggtgcactaccatctgttttcaac

SEQ ID NO: 1326 - DNA, 25 bp, Artificial sequence
  Oligonucleotide sequence
aacttgcctttctggtatgttctag

SEQ ID NO: 1327 - DNA, 25 bp, Artificial sequence
  Oligonucleotide sequence
aacccttttcacagtttgtgcactg

SEQ ID NO: 1328 - DNA, 25 bp, Artificial sequence
  Oligonucleotide sequence
aagcttagagacctttaccttccag

SEQ ID NO: 1329 - DNA, 25 bp, Artificial sequence
  Oligonucleotide sequence
caaactctgactctgtggactgaat

SEQ ID NO: 1330 - DNA, 25 bp, Artificial sequence
  Oligonucleotide sequence
cccacagtgcttgatctttcagaga

SEQ ID NO: 1331 - DNA, 25 bp, Artificial sequence
  Oligonucleotide sequence
gactgcatcgcacagacttgctata

SEQ ID NO: 1332 - DNA, 25 bp, Artificial sequence
  Oligonucleotide sequence
gacgccatgcacatagaactcttca

SEQ ID NO: 1333 - DNA, 25 bp, Artificial sequence
  Oligonucleotide sequence
gagagtctttggttgtacgtgtgta

SEQ ID NO: 1334 - DNA, 25 bp, Artificial sequence
  Oligonucleotide sequence
gttttcaacgtgaaccgacgccatg

SEQ ID NO: 1335 - DNA, 25 bp, Artificial sequence
  Oligonucleotide sequence
ctaacatttgtatggaccccttcat

SEQ ID NO: 1336 - DNA, 25 bp, Artificial sequence
  Oligonucleotide sequence
cagcaggactgattgccgggtgcaa

SEQ ID NO: 1337 - DNA, 25 bp, Artificial sequence
  Oligonucleotide sequence
accgtttttgtcctaatgcttctgt

SEQ ID NO: 1338 - DNA, 25 bp, Artificial sequence
  Oligonucleotide sequence
acctctctgccaaacgtgatcttaa

SEQ ID NO: 1339 - DNA, 25 bp, Artificial sequence
  Oligonucleotide sequence
aaatcacaccatccagactgacaat

SEQ ID NO: 1340 - DNA, 25 bp, Artificial sequence
  Oligonucleotide sequence
aacaactctctttttggcagcaact

SEQ ID NO: 1341 - DNA, 25 bp, Artificial sequence
  Oligonucleotide sequence
aagccacaccgtcgtctgtgagaaa

SEQ ID NO: 1342 - DNA, 25 bp, Artificial sequence
  Oligonucleotide sequence
ctttgctccatttcattttgccaga

SEQ ID NO: 1343 - DNA, 25 bp, Artificial sequence
  Oligonucleotide sequence
gagaaagtgcgcctccttaaagggt

SEQ ID NO: 1344 - DNA, 25 bp, Artificial sequence
  Oligonucleotide sequence
gcttctgttttatgtggtgatcgca

SEQ ID NO: 1345 - DNA, 25 bp, Artificial sequence
  Oligonucleotide sequence
taaagtgttcgttgtggtggccgtc

SEQ ID NO: 1346 - DNA, 25 bp, Artificial sequence
  Oligonucleotide sequence
atgcagatcagatggcgtttctccc

SEQ ID NO: 1347 - DNA, 25 bp, Artificial sequence
  Oligonucleotide sequence
acgtgttcagacttgtgttttcata

SEQ ID NO: 1348 - DNA, 25 bp, Artificial sequence
  Oligonucleotide sequence
aagtatgggctgtttcacgtgttca

SEQ ID NO: 1349 - DNA, 25 bp, Artificial sequence
  Oligonucleotide sequence
gactatgtactgtccacctgcatta

SEQ ID NO: 1350 - DNA, 25 bp, Artificial sequence
  Oligonucleotide sequence
gattgatttcctactagtctttgac

SEQ ID NO: 1351 - DNA, 25 bp, Artificial sequence
  Oligonucleotide sequence
gtttctcccagctcagtggattttc

SEQ ID NO: 1352 - DNA, 25 bp, Artificial sequence
  Oligonucleotide sequence
ggagcctggcttatttgattgattt

SEQ ID NO: 1353 - DNA, 25 bp, Artificial sequence
  Oligonucleotide sequence
ggaagtccctgttctgactatgtac

SEQ ID NO: 1354 - DNA, 25 bp, Artificial sequence
  Oligonucleotide sequence
tcccttcattctggtttccatgtga

SEQ ID NO: 1355 - DNA, 25 bp, Artificial sequence
  Oligonucleotide sequence
tcaccaactcccttttggatttcat

SEQ ID NO: 1356 - DNA, 25 bp, Artificial sequence
  Oligonucleotide sequence
taaacaaccatgtctgcatctaggg

SEQ ID NO: 1357 - DNA, 25 bp, Artificial sequence
  Oligonucleotide sequence
atagctgccaattagttttctttgt

SEQ ID NO: 1358 - DNA, 25 bp, Artificial sequence
  Oligonucleotide sequence
aggcacaactgtgtccaactgtata

SEQ ID NO: 1359 - DNA, 25 bp, Artificial sequence
  Oligonucleotide sequence
aacccatcttgcaggacgacattga

SEQ ID NO: 1360 - DNA, 25 bp, Artificial sequence
  Oligonucleotide sequence
gaagattggtcttctgttgatctaa

SEQ ID NO: 1361 - DNA, 25 bp, Artificial sequence
  Oligonucleotide sequence
gactttctagtgtacaaggcacaac

SEQ ID NO: 1362 - DNA, 25 bp, Artificial sequence
  Oligonucleotide sequence
gactcaatgtggatttgtgtttata

SEQ ID NO: 1363 - DNA, 25 bp, Artificial sequence
  Oligonucleotide sequence
gtttttactttgtcctttgctatct

SEQ ID NO: 1364 - DNA, 25 bp, Artificial sequence
  Oligonucleotide sequence
gtgtccaactgtatatagctgccaa

SEQ ID NO: 1365 - DNA, 25 bp, Artificial sequence
  Oligonucleotide sequence
ggagattgctaaagtaacccatctt

SEQ ID NO: 1366 - DNA, 25 bp, Artificial sequence
  Oligonucleotide sequence
tgctatctgtgttatgactcaatgt

SEQ ID NO: 1367 - DNA, 25 bp, Artificial sequence
  Oligonucleotide sequence
tttgtcctttgctatctgtgttatg

SEQ ID NO: 1368 - DNA, 25 bp, Artificial sequence
  Oligonucleotide sequence
gacttccagggcttaagggctaact

SEQ ID NO: 1369 - DNA, 25 bp, Artificial sequence
  Oligonucleotide sequence
atttgctgtgtgactatgattccta

SEQ ID NO: 1370 - DNA, 25 bp, Artificial sequence
  Oligonucleotide sequence
caaactgcctctagatgtccaaatc

SEQ ID NO: 1371 - DNA, 25 bp, Artificial sequence
  Oligonucleotide sequence
ctcagctcgctggtaattgtggtgt

SEQ ID NO: 1372 - DNA, 25 bp, Artificial sequence
  Oligonucleotide sequence
gaggaacctcagctaatcagtatta

SEQ ID NO: 1373 - DNA, 25 bp, Artificial sequence
  Oligonucleotide sequence
gtattacttgtagatccccatgcca

SEQ ID NO: 1374 - DNA, 25 bp, Artificial sequence
  Oligonucleotide sequence
gtttgagtttgtttgcagttccctc

SEQ ID NO: 1375 - DNA, 25 bp, Artificial sequence
  Oligonucleotide sequence
tcaggtgtcctatagatttttcttc

SEQ ID NO: 1376 - DNA, 25 bp, Artificial sequence
  Oligonucleotide sequence
taacgtctactgctgtttattccag

SEQ ID NO: 1377 - DNA, 25 bp, Artificial sequence
  Oligonucleotide sequence
tttaccccatcgaaccattttatag

SEQ ID NO: 1378 - DNA, 25 bp, Artificial sequence
  Oligonucleotide sequence
tttattccagtttctactacctcag

SEQ ID NO: 1379 - DNA, 25 bp, Artificial sequence
  Oligonucleotide sequence
atatatgctgtctgttttgtgtaca

SEQ ID NO: 1380 - DNA, 25 bp, Artificial sequence
  Oligonucleotide sequence
aactcactcttacagtagtctgctt

SEQ ID NO: 1381 - DNA, 25 bp, Artificial sequence
  Oligonucleotide sequence
aatgttgtcttttaaatactccgat

SEQ ID NO: 1382 - DNA, 25 bp, Artificial sequence
  Oligonucleotide sequence
caagccatttgtgggaatcctaaaa

SEQ ID NO: 1383 - DNA, 25 bp, Artificial sequence
  Oligonucleotide sequence
ccagctgtttattttattgagtcct

SEQ ID NO: 1384 - DNA, 25 bp, Artificial sequence
  Oligonucleotide sequence
gagtaacaaactcagccttctgtaa

SEQ ID NO: 1385 - DNA, 25 bp, Artificial sequence
  Oligonucleotide sequence
gaggatcatctgacttttcacttac

SEQ ID NO: 1386 - DNA, 25 bp, Artificial sequence
  Oligonucleotide sequence
gtagtctgcttatttccagctgttt

SEQ ID NO: 1387 - DNA, 25 bp, Artificial sequence
  Oligonucleotide sequence
gtgctttatgtactgttatcctata

SEQ ID NO: 1388 - DNA, 25 bp, Artificial sequence
  Oligonucleotide sequence
tgtaaaaactccttttctgccacac

SEQ ID NO: 1389 - DNA, 25 bp, Artificial sequence
  Oligonucleotide sequence
ttgggttttcttttcaactcactct

SEQ ID NO: 1390 - DNA, 25 bp, Artificial sequence
  Oligonucleotide sequence
atattgggctttgtcagtcttctga

SEQ ID NO: 1391 - DNA, 25 bp, Artificial sequence
  Oligonucleotide sequence
atgacagctttttctaacggacaaa

SEQ ID NO: 1392 - DNA, 25 bp, Artificial sequence
  Oligonucleotide sequence
aggatactccgttctgtagacacag

SEQ ID NO: 1393 - DNA, 25 bp, Artificial sequence
  Oligonucleotide sequence
actcaattctgctgttgtcgcacaa

SEQ ID NO: 1394 - DNA, 25 bp, Artificial sequence
  Oligonucleotide sequence
caaatttcccttcttctggctaatt

SEQ ID NO: 1395 - DNA, 25 bp, Artificial sequence
  Oligonucleotide sequence
ctgccgtcactgtcatgttctaaat

SEQ ID NO: 1396 - DNA, 25 bp, Artificial sequence
  Oligonucleotide sequence
gtcagatcagactcctgttacagct

SEQ ID NO: 1397 - DNA, 25 bp, Artificial sequence
  Oligonucleotide sequence
ggatgttttatctgaacgcctgctc

SEQ ID NO: 1398 - DNA, 25 bp, Artificial sequence
  Oligonucleotide sequence
tggctaattcctacactttttctca

SEQ ID NO: 1399 - DNA, 25 bp, Artificial sequence
  Oligonucleotide sequence
taaggtccaccacttgttctttgtt

SEQ ID NO: 1400 - DNA, 25 bp, Artificial sequence
  Oligonucleotide sequence
taagagctctctaacactggctgct

SEQ ID NO: 1401 - DNA, 25 bp, Artificial sequence
  Oligonucleotide sequence
atagctcagggcgattctgtgtcgt

SEQ ID NO: 1402 - DNA, 25 bp, Artificial sequence
  Oligonucleotide sequence
aacatacttagacctccagacgagc

SEQ ID NO: 1403 - DNA, 25 bp, Artificial sequence
  Oligonucleotide sequence
agcattatcaacacctagagcttaa

SEQ ID NO: 1404 - DNA, 25 bp, Artificial sequence
  Oligonucleotide sequence
aacgcgtggctctttcttgaaattg

SEQ ID NO: 1405 - DNA, 25 bp, Artificial sequence
  Oligonucleotide sequence
aaagttttgccctgaagcatccaga

SEQ ID NO: 1406 - DNA, 25 bp, Artificial sequence
  Oligonucleotide sequence
aatcgtgaagagagcgcctcagaca

SEQ ID NO: 1407 - DNA, 25 bp, Artificial sequence
  Oligonucleotide sequence
gcaactccctcattcacaagtaata

SEQ ID NO: 1408 - DNA, 25 bp, Artificial sequence
  Oligonucleotide sequence
gacagtacattttcccagcaaagtg

SEQ ID NO: 1409 - DNA, 25 bp, Artificial sequence
  Oligonucleotide sequence
gagccatgtgttttcactgccaaaa

SEQ ID NO: 1410 - DNA, 25 bp, Artificial sequence
  Oligonucleotide sequence
ggtctcacttagttattgatcagca

SEQ ID NO: 1411 - DNA, 25 bp, Artificial sequence
  Oligonucleotide sequence
tattgtgctgtcctgattggtttac

SEQ ID NO: 1412 - DNA, 25 bp, Artificial sequence
  Oligonucleotide sequence
cgttctccggtctgtagcgatttga

SEQ ID NO: 1413 - DNA, 25 bp, Artificial sequence
  Oligonucleotide sequence
aagaagtaagcagcacccgttctcc

SEQ ID NO: 1414 - DNA, 25 bp, Artificial sequence
  Oligonucleotide sequence
aggcgcctgtgccagattataatca

SEQ ID NO: 1415 - DNA, 25 bp, Artificial sequence
  Oligonucleotide sequence
agtgacacacttagctttctttctg

SEQ ID NO: 1416 - DNA, 25 bp, Artificial sequence
  Oligonucleotide sequence
aagctcactctttcatgttggatgg

SEQ ID NO: 1417 - DNA, 25 bp, Artificial sequence
  Oligonucleotide sequence
ctgccctccatcttaacttttatta

SEQ ID NO: 1418 - DNA, 25 bp, Artificial sequence
  Oligonucleotide sequence
gaaacttgtccttattcattgttgt

SEQ ID NO: 1419 - DNA, 25 bp, Artificial sequence
  Oligonucleotide sequence
ggatcacaaatcgttcatagaccat

SEQ ID NO: 1420 - DNA, 25 bp, Artificial sequence
  Oligonucleotide sequence
taatcaacacatcgcttcctttatc

SEQ ID NO: 1421 - DNA, 25 bp, Artificial sequence
  Oligonucleotide sequence
tttcacacaagttacaactgccctc

SEQ ID NO: 1422 - DNA, 25 bp, Artificial sequence
  Oligonucleotide sequence
tttctttctggcacaagctcactct

SEQ ID NO: 1423 - DNA, 25 bp, Artificial sequence
  Oligonucleotide sequence
tcccaaactttctacgatgcttacg

SEQ ID NO: 1424 - DNA, 25 bp, Artificial sequence
  Oligonucleotide sequence
aaagacgcctctgttacggactggg

SEQ ID NO: 1425 - DNA, 25 bp, Artificial sequence
  Oligonucleotide sequence
attcccagtatttgcggctgcggca

SEQ ID NO: 1426 - DNA, 25 bp, Artificial sequence
  Oligonucleotide sequence
attgggacccgggattagccatcat

SEQ ID NO: 1427 - DNA, 25 bp, Artificial sequence
  Oligonucleotide sequence
aaaaggctacaggtctctttccaca

SEQ ID NO: 1428 - DNA, 25 bp, Artificial sequence
  Oligonucleotide sequence
aaacagcattctacttggccttgca

SEQ ID NO: 1429 - DNA, 25 bp, Artificial sequence
  Oligonucleotide sequence
gagccagtgttacagcattcccagt

SEQ ID NO: 1430 - DNA, 25 bp, Artificial sequence
  Oligonucleotide sequence
gatgcttacgtttcttatgacacca

SEQ ID NO: 1431 - DNA, 25 bp, Artificial sequence
  Oligonucleotide sequence
gattgtatttattctgctggagcca

SEQ ID NO: 1432 - DNA, 25 bp, Artificial sequence
  Oligonucleotide sequence
tgataaatgagctgcgcttccacct

SEQ ID NO: 1433 - DNA, 25 bp, Artificial sequence
  Oligonucleotide sequence
ttagccatcatcgataacctcatgc

SEQ ID NO: 1434 - DNA, 25 bp, Artificial sequence
  Oligonucleotide sequence
aataagccacaaccgactctagatg

SEQ ID NO: 1435 - DNA, 25 bp, Artificial sequence
  Oligonucleotide sequence
aaaatcacttacatcatgccgccaa

SEQ ID NO: 1436 - DNA, 25 bp, Artificial sequence
  Oligonucleotide sequence
aagtgcccacatttgagtcagcgaa

SEQ ID NO: 1437 - DNA, 25 bp, Artificial sequence
  Oligonucleotide sequence
aaggcgcctctgcaatactgatttt

SEQ ID NO: 1438 - DNA, 25 bp, Artificial sequence
  Oligonucleotide sequence
aatcatcttgaaaactaccttggag

SEQ ID NO: 1439 - DNA, 25 bp, Artificial sequence
  Oligonucleotide sequence
caaacgattcctctggtattgccat

SEQ ID NO: 1440 - DNA, 25 bp, Artificial sequence
  Oligonucleotide sequence
ctctagatgtcagtgttgtgccaaa

SEQ ID NO: 1441 - DNA, 25 bp, Artificial sequence
  Oligonucleotide sequence
gtgatgggccagtcagactaagctg

SEQ ID NO: 1442 - DNA, 25 bp, Artificial sequence
  Oligonucleotide sequence
ggtatagtgcacattttcctgccag

SEQ ID NO: 1443 - DNA, 25 bp, Artificial sequence
  Oligonucleotide sequence
tttcctgccagggtatacaaaatca

SEQ ID NO: 1444 - DNA, 25 bp, Artificial sequence
  Oligonucleotide sequence
taggagtgggcaaggcaccgtcctt

SEQ ID NO: 1445 - DNA, 25 bp, Artificial sequence
  Oligonucleotide sequence
atgcctaatcagactccttgtgtta

SEQ ID NO: 1446 - DNA, 25 bp, Artificial sequence
  Oligonucleotide sequence
atgcaggtgaattccctttttcctc

SEQ ID NO: 1447 - DNA, 25 bp, Artificial sequence
  Oligonucleotide sequence
aggcagcagctcctatcacatagat

SEQ ID NO: 1448 - DNA, 25 bp, Artificial sequence
  Oligonucleotide sequence
agtgtgtcatcctcttcgtacaatg

SEQ ID NO: 1449 - DNA, 25 bp, Artificial sequence
  Oligonucleotide sequence
acccggacagtttatccacactaat

SEQ ID NO: 1450 - DNA, 25 bp, Artificial sequence
  Oligonucleotide sequence
actgctctttccttctatgatggat

SEQ ID NO: 1451 - DNA, 25 bp, Artificial sequence
  Oligonucleotide sequence
cttgtctcttgggactgaccaggaa

SEQ ID NO: 1452 - DNA, 25 bp, Artificial sequence
  Oligonucleotide sequence
ctattttctgctcacatctcttaaa

SEQ ID NO: 1453 - DNA, 25 bp, Artificial sequence
  Oligonucleotide sequence
gatggcgcaaaccagctgcctgaag

SEQ ID NO: 1454 - DNA, 25 bp, Artificial sequence
  Oligonucleotide sequence
gtatgaactcttagccaaacccgga

SEQ ID NO: 1455 - DNA, 25 bp, Artificial sequence
  Oligonucleotide sequence
tagaccaggacattccatttgccac

SEQ ID NO: 1456 - DNA, 25 bp, Artificial sequence
  Oligonucleotide sequence
atgaacctctgtgtcctgtggaaaa

SEQ ID NO: 1457 - DNA, 25 bp, Artificial sequence
  Oligonucleotide sequence
atgagccaatgaacctctgtgtcct

SEQ ID NO: 1458 - DNA, 25 bp, Artificial sequence
  Oligonucleotide sequence
agtgaactatttgcaccttttgcta

SEQ ID NO: 1459 - DNA, 25 bp, Artificial sequence
  Oligonucleotide sequence
caccttttgctaatgcctctattta

SEQ ID NO: 1460 - DNA, 25 bp, Artificial sequence
  Oligonucleotide sequence
cagtgttttaatctcttagtggaaa

SEQ ID NO: 1461 - DNA, 25 bp, Artificial sequence
  Oligonucleotide sequence
ctggttctgtttggcgtatgtgtat

SEQ ID NO: 1462 - DNA, 25 bp, Artificial sequence
  Oligonucleotide sequence
gcctctatttacttgctttggcata

SEQ ID NO: 1463 - DNA, 25 bp, Artificial sequence
  Oligonucleotide sequence
gatctcactaactactggaatcagt

SEQ ID NO: 1464 - DNA, 25 bp, Artificial sequence
  Oligonucleotide sequence
gtaacctgtgaactatgcttttcca

SEQ ID NO: 1465 - DNA, 25 bp, Artificial sequence
  Oligonucleotide sequence
ggaaactctcagttgcttaattctg

SEQ ID NO: 1466 - DNA, 25 bp, Artificial sequence
  Oligonucleotide sequence
ggaaatttcattttagatctcacta

SEQ ID NO: 1467 - DNA, 25 bp, Artificial sequence
  Oligonucleotide sequence
atgtctatttcatgcctacgcttaa

SEQ ID NO: 1468 - DNA, 25 bp, Artificial sequence
  Oligonucleotide sequence
agaccatacagttttatcccacaag

SEQ ID NO: 1469 - DNA, 25 bp, Artificial sequence
  Oligonucleotide sequence
cctgcctcgtggtttctctagaaaa

SEQ ID NO: 1470 - DNA, 25 bp, Artificial sequence
  Oligonucleotide sequence
gtttacctgggcttggaattctaga

SEQ ID NO: 1471 - DNA, 25 bp, Artificial sequence
  Oligonucleotide sequence
gatctgactctgaaatttcctttag

SEQ ID NO: 1472 - DNA, 25 bp, Artificial sequence
  Oligonucleotide sequence
gtttttcactctaatctgcattccc

SEQ ID NO: 1473 - DNA, 25 bp, Artificial sequence
  Oligonucleotide sequence
ttttccccaggctgcttgtaagatc

SEQ ID NO: 1474 - DNA, 25 bp, Artificial sequence
  Oligonucleotide sequence
tagtcctttcttctggttaactaat

SEQ ID NO: 1475 - DNA, 25 bp, Artificial sequence
  Oligonucleotide sequence
tcacatcatatattgcctctttcct

SEQ ID NO: 1476 - DNA, 25 bp, Artificial sequence
  Oligonucleotide sequence
tagttatcctgtcttttttccccag

SEQ ID NO: 1477 - DNA, 25 bp, Artificial sequence
  Oligonucleotide sequence
tataagtggtagacacctcctgcct

SEQ ID NO: 1478 - DNA, 25 bp, Artificial sequence
  Oligonucleotide sequence
aggccacatatctccgtctttttaa

SEQ ID NO: 1479 - DNA, 25 bp, Artificial sequence
  Oligonucleotide sequence
atatgctttcatttctcttgtgtaa

SEQ ID NO: 1480 - DNA, 25 bp, Artificial sequence
  Oligonucleotide sequence
aaatacgccacaatttgtccactca

SEQ ID NO: 1481 - DNA, 25 bp, Artificial sequence
  Oligonucleotide sequence
aaaactccttgggtgtgatcacgca

SEQ ID NO: 1482 - DNA, 25 bp, Artificial sequence
  Oligonucleotide sequence
aatgttttctcatatccctgttata

SEQ ID NO: 1483 - DNA, 25 bp, Artificial sequence
  Oligonucleotide sequence
gcatttatttgtgctaacctctgaa

SEQ ID NO: 1484 - DNA, 25 bp, Artificial sequence
  Oligonucleotide sequence
gtatgtactcttttgggtctggttc

SEQ ID NO: 1485 - DNA, 25 bp, Artificial sequence
  Oligonucleotide sequence
gtctggttcatccatgttgtagcat

SEQ ID NO: 1486 - DNA, 25 bp, Artificial sequence
  Oligonucleotide sequence
gtgaacctacttaacaatcctcgtc

SEQ ID NO: 1487 - DNA, 25 bp, Artificial sequence
  Oligonucleotide sequence
tattcactgttgtctgttcttctag

SEQ ID NO: 1488 - DNA, 25 bp, Artificial sequence
  Oligonucleotide sequence
ttagataccaacctccaagatgcca

SEQ ID NO: 1489 - DNA, 25 bp, Artificial sequence
  Oligonucleotide sequence
atgtgtgtctctatgtacccaagcc

SEQ ID NO: 1490 - DNA, 25 bp, Artificial sequence
  Oligonucleotide sequence
agctctgcaagtcacttacctgaag

SEQ ID NO: 1491 - DNA, 25 bp, Artificial sequence
  Oligonucleotide sequence
agactcagggatgctgtttccagct

SEQ ID NO: 1492 - DNA, 25 bp, Artificial sequence
  Oligonucleotide sequence
agcgtgtgtctacatgtgtgtctct

SEQ ID NO: 1493 - DNA, 25 bp, Artificial sequence
  Oligonucleotide sequence
aagcacagtgtctctcgaatttcgg

SEQ ID NO: 1494 - DNA, 25 bp, Artificial sequence
  Oligonucleotide sequence
gagaggcgagcatctggctgtactt

SEQ ID NO: 1495 - DNA, 25 bp, Artificial sequence
  Oligonucleotide sequence
gtaccctcctcacatttttgcatat

SEQ ID NO: 1496 - DNA, 25 bp, Artificial sequence
  Oligonucleotide sequence
ggtggccacctgcatgagtgtatta

SEQ ID NO: 1497 - DNA, 25 bp, Artificial sequence
  Oligonucleotide sequence
ggatgcattctcttgttttgcttga

SEQ ID NO: 1498 - DNA, 25 bp, Artificial sequence
  Oligonucleotide sequence
tgagtcctgtgagatgcccttgtta

SEQ ID NO: 1499 - DNA, 25 bp, Artificial sequence
  Oligonucleotide sequence
tctggttctctctctcaggaataag

SEQ ID NO: 1500 - DNA, 25 bp, Artificial sequence
  Oligonucleotide sequence
aggtggtgccagtttagagctcctg

SEQ ID NO: 1501 - DNA, 25 bp, Artificial sequence
  Oligonucleotide sequence
actgccacttgctgtgccaaatgga

SEQ ID NO: 1502 - DNA, 25 bp, Artificial sequence
  Oligonucleotide sequence
aaacagttgcacagcatctcagctc

SEQ ID NO: 1503 - DNA, 25 bp, Artificial sequence
  Oligonucleotide sequence
caatgtttagtactttcctgccttt

SEQ ID NO: 1504 - DNA, 25 bp, Artificial sequence
  Oligonucleotide sequence
gctttgtcattgtttcactactcag

SEQ ID NO: 1505 - DNA, 25 bp, Artificial sequence
  Oligonucleotide sequence
gagctgttagcctagttctcttttt

SEQ ID NO: 1506 - DNA, 25 bp, Artificial sequence
  Oligonucleotide sequence
gagatgcagcaccaggaacccttaa

SEQ ID NO: 1507 - DNA, 25 bp, Artificial sequence
  Oligonucleotide sequence
tgtgcgcagcccttaagtcaactta

SEQ ID NO: 1508 - DNA, 25 bp, Artificial sequence
  Oligonucleotide sequence
taagtcaacttagcgctttccacat

SEQ ID NO: 1509 - DNA, 25 bp, Artificial sequence
  Oligonucleotide sequence
tcaggatcccatttgcatttcttag

SEQ ID NO: 1510 - DNA, 25 bp, Artificial sequence
  Oligonucleotide sequence
tactgcactctggatttgcctacat

SEQ ID NO: 1511 - DNA, 25 bp, Artificial sequence
  Oligonucleotide sequence
atttttgtctttcactcttttcctg

SEQ ID NO: 1512 - DNA, 25 bp, Artificial sequence
  Oligonucleotide sequence
atccctgataattttcctcacttgg

SEQ ID NO: 1513 - DNA, 25 bp, Artificial sequence
  Oligonucleotide sequence
cacttggttgtttgctctgtctgaa

SEQ ID NO: 1514 - DNA, 25 bp, Artificial sequence
  Oligonucleotide sequence
gattaactctgtcttttagctggta

SEQ ID NO: 1515 - DNA, 25 bp, Artificial sequence
  Oligonucleotide sequence
gtaagcctctttatcattctctaat

SEQ ID NO: 1516 - DNA, 25 bp, Artificial sequence
  Oligonucleotide sequence
gtgggtttcctctagatagcatata

SEQ ID NO: 1517 - DNA, 25 bp, Artificial sequence
  Oligonucleotide sequence
ggctcttgttttttgattcactctg

SEQ ID NO: 1518 - DNA, 25 bp, Artificial sequence
  Oligonucleotide sequence
tccagctttcttttgcctagtgtta

SEQ ID NO: 1519 - DNA, 25 bp, Artificial sequence
  Oligonucleotide sequence
tatactgttttctactggttgccct

SEQ ID NO: 1520 - DNA, 25 bp, Artificial sequence
  Oligonucleotide sequence
taatgcccttctttatccctgataa

SEQ ID NO: 1521 - DNA, 25 bp, Artificial sequence
  Oligonucleotide sequence
tatatttttctccatccctttactt

SEQ ID NO: 1522 - DNA, 25 bp, Artificial sequence
  Oligonucleotide sequence
atagggtggtggaccttatggccca

SEQ ID NO: 1523 - DNA, 25 bp, Artificial sequence
  Oligonucleotide sequence
atattgagagtctcctgacctccac

SEQ ID NO: 1524 - DNA, 25 bp, Artificial sequence
  Oligonucleotide sequence
agaaaggccctcagctgctgggaat

SEQ ID NO: 1525 - DNA, 25 bp, Artificial sequence
  Oligonucleotide sequence
actttgtcaagctcatttcctggta

SEQ ID NO: 1526 - DNA, 25 bp, Artificial sequence
  Oligonucleotide sequence
gctgggaatgcttgtcccaacttga

SEQ ID NO: 1527 - DNA, 25 bp, Artificial sequence
  Oligonucleotide sequence
gagactagttctctcgtgacaccca

SEQ ID NO: 1528 - DNA, 25 bp, Artificial sequence
  Oligonucleotide sequence
ggcccacatggcctccaaggagtaa

SEQ ID NO: 1529 - DNA, 25 bp, Artificial sequence
  Oligonucleotide sequence
ggagccctaccttgtcatgtaccat

SEQ ID NO: 1530 - DNA, 25 bp, Artificial sequence
  Oligonucleotide sequence
ggaccaccaatcacccagcaagaga

SEQ ID NO: 1531 - DNA, 25 bp, Artificial sequence
  Oligonucleotide sequence
tgacctccacagtttccatctcaga

SEQ ID NO: 1532 - DNA, 25 bp, Artificial sequence
  Oligonucleotide sequence
ttgccctcaacgaccactttgtcaa

SEQ ID NO: 1533 - DNA, 25 bp, Artificial sequence
  Oligonucleotide sequence
agtgggcatccagttttttgaaaat

SEQ ID NO: 1534 - DNA, 25 bp, Artificial sequence
  Oligonucleotide sequence
agtgtatgattactggccttttcca

SEQ ID NO: 1535 - DNA, 25 bp, Artificial sequence
  Oligonucleotide sequence
agatttcatcgcatagctctggagt

SEQ ID NO: 1536 - DNA, 25 bp, Artificial sequence
  Oligonucleotide sequence
acaccaggcgctaattcaaggaatt

SEQ ID NO: 1537 - DNA, 25 bp, Artificial sequence
  Oligonucleotide sequence
aaaggcccaagtccgtgagcagcta

SEQ ID NO: 1538 - DNA, 25 bp, Artificial sequence
  Oligonucleotide sequence
aacatgtcctgactgtcatctgtca

SEQ ID NO: 1539 - DNA, 25 bp, Artificial sequence
  Oligonucleotide sequence
gaagtcatcttgctacgagtattta

SEQ ID NO: 1540 - DNA, 25 bp, Artificial sequence
  Oligonucleotide sequence
gagctttactccttaacagatttca

SEQ ID NO: 1541 - DNA, 25 bp, Artificial sequence
  Oligonucleotide sequence
gtgagtcaccacttcagagctttac

SEQ ID NO: 1542 - DNA, 25 bp, Artificial sequence
  Oligonucleotide sequence
tcatctgtcagctgcaaggtactct

SEQ ID NO: 1543 - DNA, 25 bp, Artificial sequence
  Oligonucleotide sequence
tattaatgatgtccaacccacctga

SEQ ID NO: 1544 - DNA, 25 bp, Artificial sequence
  Oligonucleotide sequence
aggagtcggcgcactgggtcaccca

SEQ ID NO: 1545 - DNA, 25 bp, Artificial sequence
  Oligonucleotide sequence
atgaaaaggtccatcgccgacagcg

SEQ ID NO: 1546 - DNA, 25 bp, Artificial sequence
  Oligonucleotide sequence
agaagaagaccaactctgctcccaa

SEQ ID NO: 1547 - DNA, 25 bp, Artificial sequence
  Oligonucleotide sequence
aagccggccttgattctagagagaa

SEQ ID NO: 1548 - DNA, 25 bp, Artificial sequence
  Oligonucleotide sequence
gaagcctccgtgtggagccatgaaa

SEQ ID NO: 1549 - DNA, 25 bp, Artificial sequence
  Oligonucleotide sequence
gaagctcttctggaaaagtcgggaa

SEQ ID NO: 1550 - DNA, 25 bp, Artificial sequence
  Oligonucleotide sequence
gaaagctctgttggctgcacttttt

SEQ ID NO: 1551 - DNA, 25 bp, Artificial sequence
  Oligonucleotide sequence
gagtcggtctcaaagccagatgtca

SEQ ID NO: 1552 - DNA, 25 bp, Artificial sequence
  Oligonucleotide sequence
gggcctctgtttgacggcattagaa

SEQ ID NO: 1553 - DNA, 25 bp, Artificial sequence
  Oligonucleotide sequence
taagtctctgttcacaactcacagc

SEQ ID NO: 1554 - DNA, 25 bp, Artificial sequence
  Oligonucleotide sequence
ttagaaagttgtccgccgagctggc

SEQ ID NO: 1555 - DNA, 25 bp, Artificial sequence
  Oligonucleotide sequence
atacttgggtcttccttttgacact

SEQ ID NO: 1556 - DNA, 25 bp, Artificial sequence
  Oligonucleotide sequence
agtggcagcttcttgttatgacaga

SEQ ID NO: 1557 - DNA, 25 bp, Artificial sequence
  Oligonucleotide sequence
aaatattttcctgacctgctctgtg

SEQ ID NO: 1558 - DNA, 25 bp, Artificial sequence
  Oligonucleotide sequence
cagcactggcacttatttggtatgt

SEQ ID NO: 1559 - DNA, 25 bp, Artificial sequence
  Oligonucleotide sequence
gaagattgattattccctcctttta

SEQ ID NO: 1560 - DNA, 25 bp, Artificial sequence
  Oligonucleotide sequence
gtgttaatcttaccctttctcaaat

SEQ ID NO: 1561 - DNA, 25 bp, Artificial sequence
  Oligonucleotide sequence
ggagaccgtgtactttttgtgcaac

SEQ ID NO: 1562 - DNA, 25 bp, Artificial sequence
  Oligonucleotide sequence
tgctctgtgcatagcttacccagaa

SEQ ID NO: 1563 - DNA, 25 bp, Artificial sequence
  Oligonucleotide sequence
tttattgttggcacttcctcaggga

SEQ ID NO: 1564 - DNA, 25 bp, Artificial sequence
  Oligonucleotide sequence
tttctccctattggtcagtgtgatt

SEQ ID NO: 1565 - DNA, 25 bp, Artificial sequence
  Oligonucleotide sequence
ttgacttccccaaactgaacaggct

SEQ ID NO: 1566 - DNA, 25 bp, Artificial sequence
  Oligonucleotide sequence
agatgtcttccttctcaattttgag

SEQ ID NO: 1567 - DNA, 25 bp, Artificial sequence
  Oligonucleotide sequence
aaagatcttttggtttctctgtcaa

SEQ ID NO: 1568 - DNA, 25 bp, Artificial sequence
  Oligonucleotide sequence
aaactgtcctttccattagcattct

SEQ ID NO: 1569 - DNA, 25 bp, Artificial sequence
  Oligonucleotide sequence
aagaatttgtcctagggctgctttc

SEQ ID NO: 1570 - DNA, 25 bp, Artificial sequence
  Oligonucleotide sequence
cagcctttacagaccttgttttcag

SEQ ID NO: 1571 - DNA, 25 bp, Artificial sequence
  Oligonucleotide sequence
gttttttcccctcatacattctaga

SEQ ID NO: 1572 - DNA, 25 bp, Artificial sequence
  Oligonucleotide sequence
gttcagttcgtttccatagtagcca

SEQ ID NO: 1573 - DNA, 25 bp, Artificial sequence
  Oligonucleotide sequence
gtagctttaatcacatctcttcctt

SEQ ID NO: 1574 - DNA, 25 bp, Artificial sequence
  Oligonucleotide sequence
tcttccttagaagtctcagccttta

SEQ ID NO: 1575 - DNA, 25 bp, Artificial sequence
  Oligonucleotide sequence
taggacccatttatctttcttacca

SEQ ID NO: 1576 - DNA, 25 bp, Artificial sequence
  Oligonucleotide sequence
ttgcctgagaacattcatcctgctt

SEQ ID NO: 1577 - DNA, 25 bp, Artificial sequence
  Oligonucleotide sequence
atgcgcacatttactagcacctact

SEQ ID NO: 1578 - DNA, 25 bp, Artificial sequence
  Oligonucleotide sequence
atggacttccctgcattgtatgaga

SEQ ID NO: 1579 - DNA, 25 bp, Artificial sequence
  Oligonucleotide sequence
atgtgctgtgtgctctgtgtaccct

SEQ ID NO: 1580 - DNA, 25 bp, Artificial sequence
  Oligonucleotide sequence
agttgtctggcccaaagcatcagca

SEQ ID NO: 1581 - DNA, 25 bp, Artificial sequence
  Oligonucleotide sequence
gagttcgattcccatctgaaacgac

SEQ ID NO: 1582 - DNA, 25 bp, Artificial sequence
  Oligonucleotide sequence
gagacattttccgttgtcacaactt

SEQ ID NO: 1583 - DNA, 25 bp, Artificial sequence
  Oligonucleotide sequence
gagaggtcaccgatgctgctaaaca

SEQ ID NO: 1584 - DNA, 25 bp, Artificial sequence
  Oligonucleotide sequence
gtgtggccttagtgaccaatcagtc

SEQ ID NO: 1585 - DNA, 25 bp, Artificial sequence
  Oligonucleotide sequence
tgtgtaccctcagatcacgtgaact

SEQ ID NO: 1586 - DNA, 25 bp, Artificial sequence
  Oligonucleotide sequence
tactgagggcttaccatgtgctgtg

SEQ ID NO: 1587 - DNA, 25 bp, Artificial sequence
  Oligonucleotide sequence
ttcacccctcggaacatcgatgatg

SEQ ID NO: 1588 - DNA, 25 bp, Artificial sequence
  Oligonucleotide sequence
aagaaagttccaccataatgaccct

SEQ ID NO: 1589 - DNA, 25 bp, Artificial sequence
  Oligonucleotide sequence
ctatggtctttatttcttgtggtga

SEQ ID NO: 1590 - DNA, 25 bp, Artificial sequence
  Oligonucleotide sequence
cctaattcccttcctgatgtgtatt

SEQ ID NO: 1591 - DNA, 25 bp, Artificial sequence
  Oligonucleotide sequence
gttgtttaacgtcttctgattcagt

SEQ ID NO: 1592 - DNA, 25 bp, Artificial sequence
  Oligonucleotide sequence
gtcagtaggatttttggtaccacca

SEQ ID NO: 1593 - DNA, 25 bp, Artificial sequence
  Oligonucleotide sequence
gtaaaattctccaactgctatctat

SEQ ID NO: 1594 - DNA, 25 bp, Artificial sequence
  Oligonucleotide sequence
ggtgaaacgatgtgcctttccttgc

SEQ ID NO: 1595 - DNA, 25 bp, Artificial sequence
  Oligonucleotide sequence
tggctggtcattaacttccaactat

SEQ ID NO: 1596 - DNA, 25 bp, Artificial sequence
  Oligonucleotide sequence
tccttcacacatcaggctcattaag

SEQ ID NO: 1597 - DNA, 25 bp, Artificial sequence
  Oligonucleotide sequence
taatgaccctcccaagctaggaaaa

SEQ ID NO: 1598 - DNA, 25 bp, Artificial sequence
  Oligonucleotide sequence
tttggattttgcttcttccttcaca

SEQ ID NO: 1599 - DNA, 25 bp, Artificial sequence
  Oligonucleotide sequence
atgtctctgcatgttatcacggaat

SEQ ID NO: 1600 - DNA, 25 bp, Artificial sequence
  Oligonucleotide sequence
gcaacattcaaaaccgccttttcaa

SEQ ID NO: 1601 - DNA, 25 bp, Artificial sequence
  Oligonucleotide sequence
aaatatgtctgcttcccttttttca

SEQ ID NO: 1602 - DNA, 25 bp, Artificial sequence
  Oligonucleotide sequence
gctttcagttcattatttcatccat

SEQ ID NO: 1603 - DNA, 25 bp, Artificial sequence
  Oligonucleotide sequence
gcagctttatttcagcaagtactaa

SEQ ID NO: 1604 - DNA, 25 bp, Artificial sequence
  Oligonucleotide sequence
gaagagtccttttcacctaagagtg

SEQ ID NO: 1605 - DNA, 25 bp, Artificial sequence
  Oligonucleotide sequence
gatattctgcattactggacggata

SEQ ID NO: 1606 - DNA, 25 bp, Artificial sequence
  Oligonucleotide sequence
ggtggtatgacactcaaatgcctac

SEQ ID NO: 1607 - DNA, 25 bp, Artificial sequence
  Oligonucleotide sequence
ggattcattcttaaccactacggtg

SEQ ID NO: 1608 - DNA, 25 bp, Artificial sequence
  Oligonucleotide sequence
ggacggatattttgctttcagttca

SEQ ID NO: 1609 - DNA, 25 bp, Artificial sequence
  Oligonucleotide sequence
tacagtactcttgtttccatgtctc

SEQ ID NO: 1610 - DNA, 25 bp, Artificial sequence
  Oligonucleotide sequence
atttgggtctatgctatgttattaa

SEQ ID NO: 1611 - DNA, 25 bp, Artificial sequence
  Oligonucleotide sequence
atcggtacgttggaaactgtgcaaa

SEQ ID NO: 1612 - DNA, 25 bp, Artificial sequence
  Oligonucleotide sequence
acttttgtgcaatatctgtctgatt

SEQ ID NO: 1613 - DNA, 25 bp, Artificial sequence
  Oligonucleotide sequence
aactattcttgattctgtctgtgcc

SEQ ID NO: 1614 - DNA, 25 bp, Artificial sequence
  Oligonucleotide sequence
aagatgtttctattttgggcagcat

SEQ ID NO: 1615 - DNA, 25 bp, Artificial sequence
  Oligonucleotide sequence
ctttgtgttttattttctgtcctat

SEQ ID NO: 1616 - DNA, 25 bp, Artificial sequence
  Oligonucleotide sequence
gaagatattccatttctttgtgttt

SEQ ID NO: 1617 - DNA, 25 bp, Artificial sequence
  Oligonucleotide sequence
gattctgtctgtgcctttatatttt

SEQ ID NO: 1618 - DNA, 25 bp, Artificial sequence
  Oligonucleotide sequence
gtatggaattactgacttttgtgca

SEQ ID NO: 1619 - DNA, 25 bp, Artificial sequence
  Oligonucleotide sequence
ggcacttaggaacatatcggtacgt

SEQ ID NO: 1620 - DNA, 25 bp, Artificial sequence
  Oligonucleotide sequence
ttagagtctatttcccataatttgg

SEQ ID NO: 1621 - DNA, 25 bp, Artificial sequence
  Oligonucleotide sequence
atgaaccgcgactgtgggattccac

SEQ ID NO: 1622 - DNA, 25 bp, Artificial sequence
  Oligonucleotide sequence
aaacaacggctctgggagctgccat

SEQ ID NO: 1623 - DNA, 25 bp, Artificial sequence
  Oligonucleotide sequence
gctgacattctgtacatcccagtag

SEQ ID NO: 1624 - DNA, 25 bp, Artificial sequence
  Oligonucleotide sequence
gaatccagtggttgtctctaaatgt

SEQ ID NO: 1625 - DNA, 25 bp, Artificial sequence
  Oligonucleotide sequence
gaacccgaggatttgtcagctgtca

SEQ ID NO: 1626 - DNA, 25 bp, Artificial sequence
  Oligonucleotide sequence
gtagtgaagccctcgatgcctgaaa

SEQ ID NO: 1627 - DNA, 25 bp, Artificial sequence
  Oligonucleotide sequence
gattccactcagtcatttgcaggta

SEQ ID NO: 1628 - DNA, 25 bp, Artificial sequence
  Oligonucleotide sequence
gttgggttacaactcagtcttcgga

SEQ ID NO: 1629 - DNA, 25 bp, Artificial sequence
  Oligonucleotide sequence
gtgggctcacacagttcaccaataa

SEQ ID NO: 1630 - DNA, 25 bp, Artificial sequence
  Oligonucleotide sequence
tgccatattgcttttgccgcattag

SEQ ID NO: 1631 - DNA, 25 bp, Artificial sequence
  Oligonucleotide sequence
tagaagctgtctgtttccaaacccg

SEQ ID NO: 1632 - DNA, 25 bp, Artificial sequence
  Oligonucleotide sequence
atcttgatttttactaccacatatg

SEQ ID NO: 1633 - DNA, 25 bp, Artificial sequence
  Oligonucleotide sequence
atcttgttttctttatctagcatcg

SEQ ID NO: 1634 - DNA, 25 bp, Artificial sequence
  Oligonucleotide sequence
aatatccacttatacgtacatctaa

SEQ ID NO: 1635 - DNA, 25 bp, Artificial sequence
  Oligonucleotide sequence
cctgaactcctttatggttaatact

SEQ ID NO: 1636 - DNA, 25 bp, Artificial sequence
  Oligonucleotide sequence
gctatctttgtctttttcatcttat

SEQ ID NO: 1637 - DNA, 25 bp, Artificial sequence
  Oligonucleotide sequence
gaatgcaatacacagttggccaagt

SEQ ID NO: 1638 - DNA, 25 bp, Artificial sequence
  Oligonucleotide sequence
gaatattttgctatgactacagttt

SEQ ID NO: 1639 - DNA, 25 bp, Artificial sequence
  Oligonucleotide sequence
gaatgttgtctatctcttgattgct

SEQ ID NO: 1640 - DNA, 25 bp, Artificial sequence
  Oligonucleotide sequence
gaaatgtgagagtgccccttgaaag

SEQ ID NO: 1641 - DNA, 25 bp, Artificial sequence
  Oligonucleotide sequence
tctagcatcgtatcgcactttgaaa

SEQ ID NO: 1642 - DNA, 25 bp, Artificial sequence
  Oligonucleotide sequence
taagtcctataaacctgaactcctt

SEQ ID NO: 1643 - DNA, 25 bp, Artificial sequence
  Oligonucleotide sequence
atctgtggcggatgtttcttctctg

SEQ ID NO: 1644 - DNA, 25 bp, Artificial sequence
  Oligonucleotide sequence
aggagttctcctgagctcagccgag

SEQ ID NO: 1645 - DNA, 25 bp, Artificial sequence
  Oligonucleotide sequence
agcagttcttcctgaacggctttga

SEQ ID NO: 1646 - DNA, 25 bp, Artificial sequence
  Oligonucleotide sequence
agactgacagctgactcccaggagt

SEQ ID NO: 1647 - DNA, 25 bp, Artificial sequence
  Oligonucleotide sequence
acgtgcatgtgtcttccaggagcat

SEQ ID NO: 1648 - DNA, 25 bp, Artificial sequence
  Oligonucleotide sequence
aaacaagcgacatcagcacctggga

SEQ ID NO: 1649 - DNA, 25 bp, Artificial sequence
  Oligonucleotide sequence
aaggaagggctctgcctgagcagtt

SEQ ID NO: 1650 - DNA, 25 bp, Artificial sequence
  Oligonucleotide sequence
gaacttggtcgcatttggtctgaaa

SEQ ID NO: 1651 - DNA, 25 bp, Artificial sequence
  Oligonucleotide sequence
gaaggagttccctgatcggctacag

SEQ ID NO: 1652 - DNA, 25 bp, Artificial sequence
  Oligonucleotide sequence
gtgaactgcctgttgaacttggtcg

SEQ ID NO: 1653 - DNA, 25 bp, Artificial sequence
  Oligonucleotide sequence
ggagcattgcacgttgcctgtagaa

SEQ ID NO: 1654 - DNA, 25 bp, Artificial sequence
  Oligonucleotide sequence
acatgcaccttcaactgctcagaag

SEQ ID NO: 1655 - DNA, 25 bp, Artificial sequence
  Oligonucleotide sequence
aaacatttggctgatttttgctttt

SEQ ID NO: 1656 - DNA, 25 bp, Artificial sequence
  Oligonucleotide sequence
gcaggataccaagctctatgtttta

SEQ ID NO: 1657 - DNA, 25 bp, Artificial sequence
  Oligonucleotide sequence
gatcatcaggaatctggtccagcac

SEQ ID NO: 1658 - DNA, 25 bp, Artificial sequence
  Oligonucleotide sequence
gttggcatttatcatttggctggca

SEQ ID NO: 1659 - DNA, 25 bp, Artificial sequence
  Oligonucleotide sequence
gttttatagacatcagtccctggag

SEQ ID NO: 1660 - DNA, 25 bp, Artificial sequence
  Oligonucleotide sequence
gtgaagcagcccagtacatactttc

SEQ ID NO: 1661 - DNA, 25 bp, Artificial sequence
  Oligonucleotide sequence
gtcatggttactgcattatctgggt

SEQ ID NO: 1662 - DNA, 25 bp, Artificial sequence
  Oligonucleotide sequence
ggtccagcactagtccaatgtgtca

SEQ ID NO: 1663 - DNA, 25 bp, Artificial sequence
  Oligonucleotide sequence
tggacaggagtttcacggcgatcaa

SEQ ID NO: 1664 - DNA, 25 bp, Artificial sequence
  Oligonucleotide sequence
tcatccctgtggcagtcatggttac

SEQ ID NO: 1665 - DNA, 25 bp, Artificial sequence
  Oligonucleotide sequence
aaatcatcataactcaactcctacg

SEQ ID NO: 1666 - DNA, 25 bp, Artificial sequence
  Oligonucleotide sequence
aactttgtgtcagcgatacccttta

SEQ ID NO: 1667 - DNA, 25 bp, Artificial sequence
  Oligonucleotide sequence
aactattatctcatcctctttttcg

SEQ ID NO: 1668 - DNA, 25 bp, Artificial sequence
  Oligonucleotide sequence
aatacagggttggtgctctcatcta

SEQ ID NO: 1669 - DNA, 25 bp, Artificial sequence
  Oligonucleotide sequence
gaagtacttcgtgggctatctggga

SEQ ID NO: 1670 - DNA, 25 bp, Artificial sequence
  Oligonucleotide sequence
gaaacgcatcatactgttcctgttc

SEQ ID NO: 1671 - DNA, 25 bp, Artificial sequence
  Oligonucleotide sequence
gagttaaccttgcttttcctggaag

SEQ ID NO: 1672 - DNA, 25 bp, Artificial sequence
  Oligonucleotide sequence
gatccattctgtgtgtttcttgact

SEQ ID NO: 1673 - DNA, 25 bp, Artificial sequence
  Oligonucleotide sequence
tgggcttcgcgtcttgagttaacct

SEQ ID NO: 1674 - DNA, 25 bp, Artificial sequence
  Oligonucleotide sequence
tacggtcctctttagattgctgtaa

SEQ ID NO: 1675 - DNA, 25 bp, Artificial sequence
  Oligonucleotide sequence
ttgacttaccctgctttctgaagat

SEQ ID NO: 1676 - DNA, 25 bp, Artificial sequence
  Oligonucleotide sequence
ataaagccctggagggccctgaggc

SEQ ID NO: 1677 - DNA, 25 bp, Artificial sequence
  Oligonucleotide sequence
agaatgggaccatttctctgtgaat

SEQ ID NO: 1678 - DNA, 25 bp, Artificial sequence
  Oligonucleotide sequence
accactttcctatttcacctgattt

SEQ ID NO: 1679 - DNA, 25 bp, Artificial sequence
  Oligonucleotide sequence
aagggtacatttctcctatggccga

SEQ ID NO: 1680 - DNA, 25 bp, Artificial sequence
  Oligonucleotide sequence
ctatggccgatttcaggaatttcaa

SEQ ID NO: 1681 - DNA, 25 bp, Artificial sequence
  Oligonucleotide sequence
cctgaggctcactgctgactgagaa

SEQ ID NO: 1682 - DNA, 25 bp, Artificial sequence
  Oligonucleotide sequence
gactgagaactctgtggaacatgat

SEQ ID NO: 1683 - DNA, 25 bp, Artificial sequence
  Oligonucleotide sequence
gagaatccttcagttcattcacaaa

SEQ ID NO: 1684 - DNA, 25 bp, Artificial sequence
  Oligonucleotide sequence
gtgttaaccatgaaagtactcgaag

SEQ ID NO: 1685 - DNA, 25 bp, Artificial sequence
  Oligonucleotide sequence
ggaacatgatcctaggcactgaagt

SEQ ID NO: 1686 - DNA, 25 bp, Artificial sequence
  Oligonucleotide sequence
ggcactgaagtatcgaccactttcc

SEQ ID NO: 1687 - DNA, 25 bp, Artificial sequence
  Oligonucleotide sequence
atttatcggtatgtagatagctcta

SEQ ID NO: 1688 - DNA, 25 bp, Artificial sequence
  Oligonucleotide sequence
acacttctaagtgggcaatgcaaga

SEQ ID NO: 1689 - DNA, 25 bp, Artificial sequence
  Oligonucleotide sequence
aatgcttgaattgtacacttctaag

SEQ ID NO: 1690 - DNA, 25 bp, Artificial sequence
  Oligonucleotide sequence
aatatttgaatcttatgtgtaacca

SEQ ID NO: 1691 - DNA, 25 bp, Artificial sequence
  Oligonucleotide sequence
ccaagatttgatgggatttatcggt

SEQ ID NO: 1692 - DNA, 25 bp, Artificial sequence
  Oligonucleotide sequence
gcaagagcttgtttatatttcatac

SEQ ID NO: 1693 - DNA, 25 bp, Artificial sequence
  Oligonucleotide sequence
gtagatagctctataatgcttgaat

SEQ ID NO: 1694 - DNA, 25 bp, Artificial sequence
  Oligonucleotide sequence
tgggttttagttctttctgtgccct

SEQ ID NO: 1695 - DNA, 25 bp, Artificial sequence
  Oligonucleotide sequence
tcatactttttatactttgaggaaa

SEQ ID NO: 1696 - DNA, 25 bp, Artificial sequence
  Oligonucleotide sequence
tttagttctttctgtgccctgatat

SEQ ID NO: 1697 - DNA, 25 bp, Artificial sequence
  Oligonucleotide sequence
ttctgtgccctgatattttgtatat

SEQ ID NO: 1698 - DNA, 25 bp, Artificial sequence
  Oligonucleotide sequence
atgcctgcttagtgctttctgatta

SEQ ID NO: 1699 - DNA, 25 bp, Artificial sequence
  Oligonucleotide sequence
agcctcatgagacttggcatacaca

SEQ ID NO: 1700 - DNA, 25 bp, Artificial sequence
  Oligonucleotide sequence
actcgcattctgtttcttgctttaa

SEQ ID NO: 1701 - DNA, 25 bp, Artificial sequence
  Oligonucleotide sequence
tctttgcaagtgcttttggaactaa

SEQ ID NO: 1702 - DNA, 25 bp, Artificial sequence
  Oligonucleotide sequence
ccccacaatgattttctttgcaagt

SEQ ID NO: 1703 - DNA, 25 bp, Artificial sequence
  Oligonucleotide sequence
gctttctgattactcgcattctgtt

SEQ ID NO: 1704 - DNA, 25 bp, Artificial sequence
  Oligonucleotide sequence
gcagttctgtagtgtcatttcttat

SEQ ID NO: 1705 - DNA, 25 bp, Artificial sequence
  Oligonucleotide sequence
gtttaaagcctaacaccattctaat

SEQ ID NO: 1706 - DNA, 25 bp, Artificial sequence
  Oligonucleotide sequence
gggattccagttattacgagttgct

SEQ ID NO: 1707 - DNA, 25 bp, Artificial sequence
  Oligonucleotide sequence
tcttggattaactgatgcctgctta

SEQ ID NO: 1708 - DNA, 25 bp, Artificial sequence
  Oligonucleotide sequence
tacacacacactcatgggattccag

SEQ ID NO: 1709 - DNA, 25 bp, Artificial sequence
  Oligonucleotide sequence
atgacccgagaggtgcagaccaatg

SEQ ID NO: 1710 - DNA, 25 bp, Artificial sequence
  Oligonucleotide sequence
atccactccatgatgtctttgttag

SEQ ID NO: 1711 - DNA, 25 bp, Artificial sequence
  Oligonucleotide sequence
atgggatggatcttactcgtgacaa

SEQ ID NO: 1712 - DNA, 25 bp, Artificial sequence
  Oligonucleotide sequence
atggttatttgcttcgtctgttctg

SEQ ID NO: 1713 - DNA, 25 bp, Artificial sequence
  Oligonucleotide sequence
aactgcctaactaacttccatggga

SEQ ID NO: 1714 - DNA, 25 bp, Artificial sequence
  Oligonucleotide sequence
aaggcttgccagtctatttatccac

SEQ ID NO: 1715 - DNA, 25 bp, Artificial sequence
  Oligonucleotide sequence
gattcggaagacctcttatgctcag

SEQ ID NO: 1716 - DNA, 25 bp, Artificial sequence
  Oligonucleotide sequence
gtctgttctgtgttggttttactaa

SEQ ID NO: 1717 - DNA, 25 bp, Artificial sequence
  Oligonucleotide sequence
tgacggatacgagccaccagtgcaa

SEQ ID NO: 1718 - DNA, 25 bp, Artificial sequence
  Oligonucleotide sequence
ttatgctcagcaccaacaggtccgt

SEQ ID NO: 1719 - DNA, 25 bp, Artificial sequence
  Oligonucleotide sequence
tgacgtcaagactaccgatggttat

SEQ ID NO: 1720 - DNA, 25 bp, Artificial sequence
  Oligonucleotide sequence
cagttttgcttgtcatacgtcttta

SEQ ID NO: 1721 - DNA, 25 bp, Artificial sequence
  Oligonucleotide sequence
cagtgttgaatcttccaatccatga

SEQ ID NO: 1722 - DNA, 25 bp, Artificial sequence
  Oligonucleotide sequence
gacctgtaacactgtctctttcata

SEQ ID NO: 1723 - DNA, 25 bp, Artificial sequence
  Oligonucleotide sequence
gatggtttctgttctgactcactgg

SEQ ID NO: 1724 - DNA, 25 bp, Artificial sequence
  Oligonucleotide sequence
gtcaatttgtctaacctgtggcagt

SEQ ID NO: 1725 - DNA, 25 bp, Artificial sequence
  Oligonucleotide sequence
gtggcagtactatacaatcctgagt

SEQ ID NO: 1726 - DNA, 25 bp, Artificial sequence
  Oligonucleotide sequence
ggttgttgcagcaccattttctgaa

SEQ ID NO: 1727 - DNA, 25 bp, Artificial sequence
  Oligonucleotide sequence
tgaaaagttcatcctttcctcactg

SEQ ID NO: 1728 - DNA, 25 bp, Artificial sequence
  Oligonucleotide sequence
tttgtgtgggtctcttgatggtttc

SEQ ID NO: 1729 - DNA, 25 bp, Artificial sequence
  Oligonucleotide sequence
ttagccatttgcttttccatacaat

SEQ ID NO: 1730 - DNA, 25 bp, Artificial sequence
  Oligonucleotide sequence
ttcttccttgagagtatcttggcta

SEQ ID NO: 1731 - DNA, 25 bp, Artificial sequence
  Oligonucleotide sequence
atgttatctacagactttgggtgat

SEQ ID NO: 1732 - DNA, 25 bp, Artificial sequence
  Oligonucleotide sequence
agcccatagaatgcacaacaccaag

SEQ ID NO: 1733 - DNA, 25 bp, Artificial sequence
  Oligonucleotide sequence
cagaggatttttagggcagtgaaac

SEQ ID NO: 1734 - DNA, 25 bp, Artificial sequence
  Oligonucleotide sequence
cagctattatgatcctgaatgtata

SEQ ID NO: 1735 - DNA, 25 bp, Artificial sequence
  Oligonucleotide sequence
gcaggtaacagagcacagaggattt

SEQ ID NO: 1736 - DNA, 25 bp, Artificial sequence
  Oligonucleotide sequence
gagaaaaccctaatgttatctacag

SEQ ID NO: 1737 - DNA, 25 bp, Artificial sequence
  Oligonucleotide sequence
gtaaacacaggaaatctgaaccaga

SEQ ID NO: 1738 - DNA, 25 bp, Artificial sequence
  Oligonucleotide sequence
gtctgatactttaacagtggacaca

SEQ ID NO: 1739 - DNA, 25 bp, Artificial sequence
  Oligonucleotide sequence
gtggacacatgtcattatacgtttg

SEQ ID NO: 1740 - DNA, 25 bp, Artificial sequence
  Oligonucleotide sequence
ggcagtgaaacaattctgtctgata

SEQ ID NO: 1741 - DNA, 25 bp, Artificial sequence
  Oligonucleotide sequence
tatacgtttgtttaagcccatagaa

SEQ ID NO: 1742 - DNA, 25 bp, Artificial sequence
  Oligonucleotide sequence
tttagtcaaagtgcccattacctcc

SEQ ID NO: 1743 - DNA, 25 bp, Artificial sequence
  Oligonucleotide sequence
aaaattttcacctgctgtctaactg

SEQ ID NO: 1744 - DNA, 25 bp, Artificial sequence
  Oligonucleotide sequence
cattacctcctctgtttttgtaata

SEQ ID NO: 1745 - DNA, 25 bp, Artificial sequence
  Oligonucleotide sequence
ctgctgtctaactgaaattccatta

SEQ ID NO: 1746 - DNA, 25 bp, Artificial sequence
  Oligonucleotide sequence
gaaattcttttcattggtgcctgta

SEQ ID NO: 1747 - DNA, 25 bp, Artificial sequence
  Oligonucleotide sequence
gtttggatctgcacaattgggtttt

SEQ ID NO: 1748 - DNA, 25 bp, Artificial sequence
  Oligonucleotide sequence
gttagtagtcctgtaaagtgtttct

SEQ ID NO: 1749 - DNA, 25 bp, Artificial sequence
  Oligonucleotide sequence
ggtgcctgtactgtaacaattactt

SEQ ID NO: 1750 - DNA, 25 bp, Artificial sequence
  Oligonucleotide sequence
gggtttttgcacagaagtcattttt

SEQ ID NO: 1751 - DNA, 25 bp, Artificial sequence
  Oligonucleotide sequence
tctaggtgaagcatactccagtgtt

SEQ ID NO: 1752 - DNA, 25 bp, Artificial sequence
  Oligonucleotide sequence
ttgacgacacaactgtatcatggat

SEQ ID NO: 1753 - DNA, 25 bp, Artificial sequence
  Oligonucleotide sequence
atggaggctccatacctaagtcaga

SEQ ID NO: 1754 - DNA, 25 bp, Artificial sequence
  Oligonucleotide sequence
aactgcatcgcttcagtgcaacagt

SEQ ID NO: 1755 - DNA, 25 bp, Artificial sequence
  Oligonucleotide sequence
aagactgctttgtatgtgactcccc

SEQ ID NO: 1756 - DNA, 25 bp, Artificial sequence
  Oligonucleotide sequence
aaggaggctaccaccattgtgatca

SEQ ID NO: 1757 - DNA, 25 bp, Artificial sequence
  Oligonucleotide sequence
aagtctgccattagtgaccacctca

SEQ ID NO: 1758 - DNA, 25 bp, Artificial sequence
  Oligonucleotide sequence
ctgaatcatgttcgcaagtctgcca

SEQ ID NO: 1759 - DNA, 25 bp, Artificial sequence
  Oligonucleotide sequence
cagctcctcaactcacaagattgtt

SEQ ID NO: 1760 - DNA, 25 bp, Artificial sequence
  Oligonucleotide sequence
gcacttcttgcaatgtggttctgaa

SEQ ID NO: 1761 - DNA, 25 bp, Artificial sequence
  Oligonucleotide sequence
ggaggaaaactcttctgcacttctt

SEQ ID NO: 1762 - DNA, 25 bp, Artificial sequence
  Oligonucleotide sequence
ggaggccaacatcccacttgagaag

SEQ ID NO: 1763 - DNA, 25 bp, Artificial sequence
  Oligonucleotide sequence
ttcctgtctcgccacgtgaagaatg

SEQ ID NO: 1764 - DNA, 25 bp, Artificial sequence
  Oligonucleotide sequence
agtgtcacagtacattttcaagttt

SEQ ID NO: 1765 - DNA, 25 bp, Artificial sequence
  Oligonucleotide sequence
acagtgcctctgtatgctttttgta

SEQ ID NO: 1766 - DNA, 25 bp, Artificial sequence
  Oligonucleotide sequence
aacgcttctttatttttgatacaca

SEQ ID NO: 1767 - DNA, 25 bp, Artificial sequence
  Oligonucleotide sequence
cagactgcagtcgtacttgattttt

SEQ ID NO: 1768 - DNA, 25 bp, Artificial sequence
  Oligonucleotide sequence
ccagttcatctttagctttcgttgt

SEQ ID NO: 1769 - DNA, 25 bp, Artificial sequence
  Oligonucleotide sequence
gaactgcacagtcctaataatcaaa

SEQ ID NO: 1770 - DNA, 25 bp, Artificial sequence
  Oligonucleotide sequence
gatacctcttaaacttatgtctttt

SEQ ID NO: 1771 - DNA, 25 bp, Artificial sequence
  Oligonucleotide sequence
gatatatccctttagcattacctta

SEQ ID NO: 1772 - DNA, 25 bp, Artificial sequence
  Oligonucleotide sequence
gtttagacttgaatcccagttcatc

SEQ ID NO: 1773 - DNA, 25 bp, Artificial sequence
  Oligonucleotide sequence
tgtttcctattttttgatacctctt

SEQ ID NO: 1774 - DNA, 25 bp, Artificial sequence
  Oligonucleotide sequence
tcgttgtgcttttttaacgcttctt

SEQ ID NO: 1775 - DNA, 25 bp, Artificial sequence
  Oligonucleotide sequence
atgttttcgcttttattgttatgtg

SEQ ID NO: 1776 - DNA, 25 bp, Artificial sequence
  Oligonucleotide sequence
agagtgtatgcctatttttatgttg

SEQ ID NO: 1777 - DNA, 25 bp, Artificial sequence
  Oligonucleotide sequence
acttgtgatttctttcttttgagga

SEQ ID NO: 1778 - DNA, 25 bp, Artificial sequence
  Oligonucleotide sequence
aagcagcatctttgttacgttaaat

SEQ ID NO: 1779 - DNA, 25 bp, Artificial sequence
  Oligonucleotide sequence
aagtttggttgattttctgttctga

SEQ ID NO: 1780 - DNA, 25 bp, Artificial sequence
  Oligonucleotide sequence
gaacaagcgttatcatcattattat

SEQ ID NO: 1781 - DNA, 25 bp, Artificial sequence
  Oligonucleotide sequence
gatgtgaaactgcacctttttgcta

SEQ ID NO: 1782 - DNA, 25 bp, Artificial sequence
  Oligonucleotide sequence
ggcttaaatttatccataccagttt

SEQ ID NO: 1783 - DNA, 25 bp, Artificial sequence
  Oligonucleotide sequence
ggtatttgaggactgacatttgaca

SEQ ID NO: 1784 - DNA, 25 bp, Artificial sequence
  Oligonucleotide sequence
ggcacttgttaattttttcagtctg

SEQ ID NO: 1785 - DNA, 25 bp, Artificial sequence
  Oligonucleotide sequence
ttcagtctgtcaattcacacctttt

SEQ ID NO: 1786 - DNA, 25 bp, Artificial sequence
  Oligonucleotide sequence
agctgaaacacatctcttgggtcct

SEQ ID NO: 1787 - DNA, 25 bp, Artificial sequence
  Oligonucleotide sequence
gcttcccatcatagttttgccgtta

SEQ ID NO: 1788 - DNA, 25 bp, Artificial sequence
  Oligonucleotide sequence
gattcccagaatgccatcgatgacc

SEQ ID NO: 1789 - DNA, 25 bp, Artificial sequence
  Oligonucleotide sequence
gttccgttttcaaggaccagtcagc

SEQ ID NO: 1790 - DNA, 25 bp, Artificial sequence
  Oligonucleotide sequence
gtaacagtgactcctgattcccaga

SEQ ID NO: 1791 - DNA, 25 bp, Artificial sequence
  Oligonucleotide sequence
gtgtgagcagctcctcctgtatagt

SEQ ID NO: 1792 - DNA, 25 bp, Artificial sequence
  Oligonucleotide sequence
tggagcttttgcctgtagcttgaga

SEQ ID NO: 1793 - DNA, 25 bp, Artificial sequence
  Oligonucleotide sequence
tgtatagtcctcttcttcactgaat

SEQ ID NO: 1794 - DNA, 25 bp, Artificial sequence
  Oligonucleotide sequence
tcagtacgtcagtggtggagctttt

SEQ ID NO: 1795 - DNA, 25 bp, Artificial sequence
  Oligonucleotide sequence
ttcactgaatgctggaacctccaac

SEQ ID NO: 1796 - DNA, 25 bp, Artificial sequence
  Oligonucleotide sequence
tttacccgcagtatcaagcacaaga

SEQ ID NO: 1797 - DNA, 25 bp, Artificial sequence
  Oligonucleotide sequence
tcagtagtaactctgccttggcact

SEQ ID NO: 1798 - DNA, 25 bp, Artificial sequence
  Oligonucleotide sequence
atatgtcaagccctaattgtccccg

SEQ ID NO: 1799 - DNA, 25 bp, Artificial sequence
  Oligonucleotide sequence
atggttcatcatcctgagctgttca

SEQ ID NO: 1800 - DNA, 25 bp, Artificial sequence
  Oligonucleotide sequence
aattagctgctactactcctgcagg

SEQ ID NO: 1801 - DNA, 25 bp, Artificial sequence
  Oligonucleotide sequence
caacgtgttgagatcattgccacaa

SEQ ID NO: 1802 - DNA, 25 bp, Artificial sequence
  Oligonucleotide sequence
gccatcatttccctgcatacagtat

SEQ ID NO: 1803 - DNA, 25 bp, Artificial sequence
  Oligonucleotide sequence
gaatccagagtccaagaccgtcaag

SEQ ID NO: 1804 - DNA, 25 bp, Artificial sequence
  Oligonucleotide sequence
ggtactactgatacggatggcccaa

SEQ ID NO: 1805 - DNA, 25 bp, Artificial sequence
  Oligonucleotide sequence
gttctcctaagatgaccaaccagtc

SEQ ID NO: 1806 - DNA, 25 bp, Artificial sequence
  Oligonucleotide sequence
ggtctaaaagatctcctcgaacact

SEQ ID NO: 1807 - DNA, 25 bp, Artificial sequence
  Oligonucleotide sequence
taattgtccccggattgcagttctc

What is claimed is:

1. A method for determining the presence or degree of a physiological response to stress or a related condition in a test subject, comprising detecting in the test subject aberrant expression of at least one stress marker gene selected from the group consisting of: (a) a gene having a polynucleotide expression product comprising a nucleotide sequence that shares at least 50% sequence identity with the sequence set forth in any one of SEQ ID NO: 1, 3, 4, 5, 7, 9, 11, 13, 15, 16, 17, 19, 21, 23, 24, 25, 26, 28, 29, 30, 32, 33, 34, 35, 37, 38, 39, 40, 41, 42, 44, 46, 48, 50, 51, 52, 54, 55, 56, 57, 59, 62, 63, 64, 66, 68, 70, 71, 73, 75, 77, 79, 81, 83, 85, 87, 89, 90, 91, 92, 93, 95, 96, 97, 99, 101, 103, 105, 107, 108, 109, 111, 113, 115, 117, 118, 119, 121, 123, 125, 126, 127, 129, 130, 131, 133, 135, 137, 139, 141, 143, 144, 145, 147, 148, 150, 151, 153, 155, 156, 158, 160, 161, 163, 164, 165, 167, 169, 170, 171, 173, 175, 176, 178, 180, 182, 184, 185, 186, 187, 188, 190, 192, 194, 195, 196, 198, 200, 202, 204, 206, 208, 210, 212, 214, 216, 218, 220, 222, 224, 226, 228, 230, 232, 233, 234, 236, 238, 239, 240, 241, 242, 243, 244, 246 or 248, or a complement thereof; (b) a gene having a polynucleotide expression product comprising a nucleotide sequence that encodes a polypeptide comprising the amino acid sequence set forth in any one of SEQ ID NO: 2, 6, 8, 10, 12, 14, 18, 20, 22, 27, 31, 36, 43, 45, 47, 49, 53, 58, 60, 61, 65, 67, 69, 72, 74, 76, 78, 80, 82, 84, 86, 88, 94, 98, 100, 102, 104, 106, 110, 112, 114, 116, 120, 122, 124, 128, 132, 134, 136, 138, 140, 142, 146, 149, 152, 154, 157, 159, 162, 166, 168, 172, 174, 177, 179, 181, 183, 189, 191, 193, 197, 199, 201, 203, 205, 207, 209, 211, 213, 215, 217, 219, 221, 223, 225, 227, 229, 231, 235, 237, 245, 247 or 249; (c) a gene having a polynucleotide expression product comprising a nucleotide sequence that encodes a polypeptide that shares at least 50% sequence similarity with at least a portion of the sequence set forth in SEQ ID NO: 22, 6, 8, 10, 12, 14, 18, 20, 22, 27, 31, 36, 43, 45, 47, 49, 53, 58, 60, 61, 65, 67, 69, 72, 74, 76, 78, 80, 82, 84, 86, 88, 94, 98, 100, 102, 104, 106, 110, 112, 114, 116, 120, 122, 124, 128, 132, 134, 136, 138, 140, 142, 146, 149, 152, 154, 157, 159, 162, 166, 168, 172, 174, 177, 179, 181, 183, 189, 191, 193, 197, 199, 201, 203, 205, 207, 209, 211, 213, 215, 217, 219, 221, 223, 225, 227, 229, 231, 235, 237, 245, 247 or 249, wherein the portion comprises at least 15 contiguous amino acid residues of that sequence; and (d) a gene having a polynucleotide expression product comprising a nucleotide sequence that hybridizes to the sequence of (a), (b), (c) or a complement thereof, under at least low stringency conditions.

2. A method according to claim 1, comprising comprise detecting aberrant expression of a stress marker polynucleotide selected from the group consisting of (a) a polynucleotide comprising a nucleotide sequence that shares at least 50% sequence identity with the sequence set forth in any one of SEQ ID NO: 1, 3, 4, 5, 7, 9, 11, 13, 15, 16, 17, 19, 21, 23, 24, 25, 26, 28, 29, 30, 32, 33, 34, 35, 37, 38, 39, 40, 41, 42, 44, 46, 48, 50, 51, 52, 54, 55, 56, 57, 59, 62, 63, 64, 66, 68, 70, 71, 73, 75, 77, 79, 81, 83, 85, 87, 89, 90, 91, 92, 93, 95, 96, 97, 99, 101, 103, 105, 107, 108, 109, 111, 113, 115, 117, 118, 119, 121, 123, 125, 126, 127, 129, 130, 131, 133, 135, 137, 139, 141, 143, 144, 145, 147, 148, 150, 151, 153, 155, 156, 158, 160, 161, 163, 164, 165, 167, 169, 170, 171, 173, 175, 176, 178, 180, 182, 184, 185, 186, 187, 188, 190, 192, 194, 195, 196, 198, 200, 202, 204, 206, 208, 210, 212, 214, 216, 218, 220, 222, 224, 226, 228, 230, 232, 233, 234, 236, 238, 239, 240, 241, 242, 243, 244, 246 or 248, or a complement thereof; (b) a polynucleotide comprising a nucleotide sequence that encodes a polypeptide comprising the amino acid sequence set forth in any one of SEQ ID NO: 2, 6, 8, 10, 12, 14, 18, 20, 22, 27, 31, 36, 43, 45, 47, 49, 53, 58, 60, 61, 65, 67, 69, 72, 74, 76, 78, 80, 82, 84, 86, 88, 94, 98, 100, 102, 104, 106, 110, 112, 114, 116, 120, 122, 124, 128, 132, 134, 136, 138, 140, 142, 146, 149, 152, 154, 157, 159, 162, 166, 168, 172, 174, 177, 179, 181, 183, 189, 191, 193, 197, 199, 201, 203, 205, 207, 209, 211, 213, 215, 217, 219, 221, 223, 225, 227, 229, 231, 235, 237, 245, 247 or 249; (c) a polynucleotide comprising a nucleotide sequence that encodes a polypeptide that shares at least 50% sequence similarity with at least a portion of the sequence set forth in SEQ ID NO: 2, 6, 8, 10, 12, 14, 18, 20, 22, 27, 31, 36, 43, 45, 47, 49, 53, 58, 60, 61, 65, 67, 69, 72, 74, 76, 78, 80, 82, 84, 86, 88, 94, 98, 100, 102, 104, 106, 110, 112, 114, 116, 120, 122, 124, 128, 132, 134, 136, 138, 140, 142, 146, 149, 152, 154, 157, 159, 162, 166, 168, 172, 174, 177, 179, 181, 183, 189, 191, 193, 197, 199, 201, 203, 205, 207, 209, 211, 213, 215, 217, 219, 221, 223, 225, 227, 229, 231, 235, 237, 245, 247 or 249, wherein the portion comprises at least 15 contiguous amino acid residues of that sequence; and (d) a polynucleotide comprising a nucleotide sequence that hybridizes to the sequence of (a), (b), (c) or a complement thereof, under at least low stringency conditions.

3. A method according to claim 1, comprising detecting aberrant expression of a stress marker polypeptide selected from the group consisting of: (i) a polypeptide comprising an amino acid sequence that shares at least 50% (sequence similarity with the sequence set forth in any one of SEQ ID NO: 2, 6, 8, 10, 12, 14, 18, 20, 22, 27, 31, 36, 43, 45, 47, 49, 53, 58, 60, 61, 65, 67, 69, 72, 74, 76, 78, 80, 82, 84, 86, 88, 94, 98, 100, 102, 104, 106, 110, 112, 114, 116, 120, 122, 124, 128, 132, 134, 136, 138, 140, 142, 146, 149, 152, 154, 157, 159, 162, 166, 168, 172, 174, 177, 179, 181, 183, 189, 191, 193, 197, 199, 201, 203, 205, 207, 209, 211, 213, 215, 217, 219, 221, 223, 225, 227, 229, 231, 235, 237, 245, 247 or 249; (ii) a polypeptide comprising a portion of the sequence set forth in any one of SEQ ID NO: 2, 6, 8, 10, 12, 14, 18, 20, 22, 27, 31, 36, 43, 45, 47, 49, 53, 58, 60, 61, 65, 67, 69, 72, 74, 76, 78, 80, 82, 84, 86, 88, 94, 98, 100, 102, 104, 106, 110, 112, 114, 116, 120, 122, 124, 128, 132, 134, 136, 138, 140, 142, 146, 149, 152, 154, 157, 159, 162, 166, 168, 172, 174, 177, 179, 181, 183, 189, 191, 193, 197, 199, 201, 203, 205, 207, 209, 211, 213, 215, 217, 219, 221, 223, 225, 227, 229, 231, 235, 237, 245, 247 or 249, wherein the portion comprises at least 5 contiguous amino acid residues of that sequence; (iii) a polypeptide comprising an amino acid sequence that shares at least 30% similarity with at least 15 contiguous amino acid residues of the sequence set forth in any one of SEQ ID NO: 2, 6, 8, 10, 12, 14, 18, 20, 22, 27, 31, 36, 43, 45, 47, 49, 53, 58, 60, 61, 65, 67, 69, 72, 74, 76, 78, 80, 82, 84, 86, 88, 94, 98, 100, 102, 104, 106, 110, 112, 114, 116, 120, 122, 124, 128, 132, 134, 136, 138, 140, 142, 146, 149, 152, 154, 157, 159, 162, 166, 168, 172, 174, 177, 179, 181, 183, 189, 191, 193, 197, 199, 201, 203, 205, 207, 209, 211, 213, 215, 217, 219, 221, 223, 225, 227, 229, 231, 235, 237, 245, 247 or 249; and (iv) a polypeptide comprising a portion of the sequence set forth in any one of SEQ ID NO: 2, 6, 8, 10, 12, 14, 18, 20, 22, 27, 31, 36, 43, 45, 47, 49, 53, 58, 60, 61, 65, 67, 69, 72, 74, 76, 78, 80, 82, 84, 86, 88, 94, 98, 100, 102, 104, 106, 110, 112, 114, 116, 120, 122, 124, 128, 132, 134, 136, 138, 140, 142, 146, 149, 152, 154, 157, 159, 162, 166, 168, 172, 174, 177, 179, 181, 183, 189, 191, 193, 197, 199, 201, 203, 205, 207, 209, 211, 213, 215, 217, 219, 221, 223, 225, 227, 229, 231, 235, 237, 245, 247 or 249, wherein the portion comprises at least 5 contiguous amino acid residues of that sequence and is immuno-interactive with an antigen-binding molecule that is immuno-interactive with a sequence of (i), (ii) or (iii).

4. A method according to claim 1, wherein the aberrant expression is detected by: (1) measuring in a biological sample obtained from the test subject the level or functional activity of an expression product of at least one stress marker gene and (2) comparing the measured level or functional activity of each expression product to the level or functional activity of a corresponding expression product in a reference sample obtained from one or more normal subjects or from one or more subjects not under stress, wherein a difference in the level or functional activity of the expression product in the biological sample as compared to the level or functional activity of the corresponding expression product in the reference sample is indicative of the presence of a physiological response to stress in the test subject.

5. A method according to claim 4, further comprising diagnosing the presence, stage or degree of a physiological response to stress in the test subject when the measured level or functional activity of the or each expression product is 10% lower than the measured level or functional activity of the or each corresponding expression product.

6. A method according to claim 5, wherein the presence of a physiological response to stress is determined by detecting a decrease in the level or functional activity of at least one stress marker polynucleotide selected from (a) a polynucleotide comprising a nucleotide sequence that shares at least 50% sequence identity with the sequence set forth in any one of SEQ ID NO: 1, 3, 4, 7, 9, 11, 19, 21, 24, 25, 33, 34, 38, 39, 40, 41, 42, 50, 51, 56, 57, 59, 62, 63, 66, 70, 71, 73, 75, 79, 81, 83, 89, 90, 91, 92, 93, 97, 99, 105, 107, 108, 111, 119, 121, 122, 123, 129, 130, 137, 139, 140, 141, 142, 143 or 185, or a complement thereof; (b) a polynucleotide comprising a nucleotide sequence that encodes a polypeptide comprising the amino acid sequence set forth in any one of SEQ ID NO: 2, 8, 10, 12, 20, 22, 43, 58, 60, 67, 71, 72, 74, 76, 80, 82, 84, 94, 98, 100, 106, 112, 120, 122, 123, 124 or 138; (c) a polynucleotide comprising a nucleotide sequence that encodes a polypeptide that shares at least 50% sequence similarity with at least a portion of the sequence set forth in SEQ ID NO: 2, 8, 10, 12, 20, 22, 43, 58, 60, 67, 71, 72, 74, 76, 80, 82, 84, 94, 98, 100, 106, 112, 120, 122, 123, 124 or 138, wherein the portion comprises at least 15 contiguous amino acid residues of that sequence; and (d) a polynucleotide comprising a nucleotide sequence that hybridizes to the sequence of (a), (b), (c) or a complement thereof, under at least low stringency conditions.

7. A method according to claim 4, further comprising diagnosing the presence, stage or degree of the physiological response to stress in the test subject when the measured level or functional activity of the or each expression product is 10% higher than the measured level or functional activity of the or each corresponding expression product.

8. A method according to claim 7, wherein the presence of a physiological response to stress is determined by detecting an increase in the level or functional activity of at least one stress marker polynucleotide selected from (a) a polynucleotide comprising a nucleotide sequence that shares at least 50% sequence identity with the sequence set forth in any one of SEQ ID NO: 5, 13, 15, 16, 17, 23, 26, 28, 29, 30, 32, 35, 37, 44, 46, 48, 52, 54, 55, 64, 68, 77, 85, 87, 95, 96, 101, 103, 113, 115, 117, 118, 125, 126, 131, 133, 135, 144, 145, 147, 148, 150, 151, 153, 155, 156, 158, 160, 161, 163, 164, 165, 167, 169, 170, 171, 173, 175, 176, 178, 180, 182, 183, 184, 186, 187, 188, 190, 192, 194, 195, 196, 198, 200, 202, 204, 206 or 210, or a complement thereof; (b) a polynucleotide comprising a nucleotide sequence that encodes a polypeptide comprising the amino acid sequence set forth in any one of SEQ ID NO: 6, 14, 18, 27, 31, 36, 45, 47, 49, 53, 65, 69, 78, 86, 88, 102, 104, 114, 116, 132, 134, 136, 146, 149, 152, 154, 157, 159, 162, 166, 168, 172, 174, 177, 179, 181, 189, 191, 193, 197, 199, 201, 203, 205, 207 or 211; (c) a polynucleotide comprising a nucleotide sequence that encodes a polypeptide that shares at least 50% sequence similarity with at least a portion of the sequence set forth in SEQ ID NO: 6, 14, 18, 27, 31, 36, 45, 47, 49, 53, 65, 69, 78, 86, 88, 102, 104, 114, 116, 132, 134, 136, 146, 149, 152, 154, 157, 159, 162, 166, 168, 172, 174, 177, 179, 181, 189, 191, 193, 197, 199, 201, 203, 205, 207 or 211, wherein the portion comprises at least 15 contiguous amino acid residues of that sequence; and (d) a polynucleotide comprising a nucleotide sequence that hybridizes to the sequence of (a), (b), (c) or a complement thereof, under at least low stringency conditions.

9. A method according to claim 4, further comprising diagnosing the absence of a physiological response to stress when the measured level or functional activity of the or each expression product is the same as or similar to the measured level or functional activity of the or each corresponding expression product.

10. A method according to claim 4, wherein the measured level or functional activity of an individual expression product varies from the measured level or functional activity of an individual corresponding expression product by no more than about 5%.

11. A method according to claim 4, comprising measuring the level or functional activity of individual expression products of at least about 2 stress marker genes.

12. A method according to claim 4, comprising measuring the level or functional activity of individual expression products of at least 1 level one correlation stress marker gene selected from: (a) a polynucleotide comprising a nucleotide sequence that shares at least 50% sequence identity with the sequence set forth in any one of SEQ ID NO: 89, 90, 103, 125, 126, 163, 178, 182, 184 or 190, or a complement thereof; (b) a polynucleotide comprising a nucleotide sequence that encodes a polypeptide comprising the amino acid sequence set forth in any one of SEQ ID NO: 104, 179, 183 or 189; (c) a polynucleotide comprising a nucleotide sequence that encodes a polypeptide that shares at least 50% sequence similarity with at least a portion of the sequence set forth in SEQ ID NO: 104, 179, 183 or 189, wherein the portion comprises at least 15 contiguous amino acid residues of that sequence; and (d) a polynucleotide comprising a nucleotide sequence that hybridizes to the sequence of (a), (b), (c) or a complement thereof, under at least low stringency conditions.

13. A method according to claim 4, comprising measuring the level or functional activity of individual expression products of at least 1 level two correlation stress marker gene selected from: (a) a polynucleotide comprising a nucleotide sequence that shares at least 50% sequence identity with the sequence set forth in any one of SEQ ID NO: 17, 23, 44, 52, 133, 135, 144, 147, 148, 151, 155, 192, 196, 202 or 206, or a complement thereof; (b) a polynucleotide comprising a nucleotide sequence that encodes a polypeptide comprising the amino acid sequence set forth in any one of SEQ ID NO: 18, 20, 45, 53, 134, 136, 149, 152, 193, 197 or 207; (c) a polynucleotide comprising a nucleotide sequence that encodes a polypeptide that shares at least 50% sequence similarity with at least a portion of the sequence set forth in SEQ ID NO: 18, 20, 45, 53, 134, 136, 149, 152, 193, 197 or 207, wherein the portion comprises at least 15 contiguous amino acid residues of that sequence; and (d) a polynucleotide comprising a nucleotide sequence that hybridizes to the sequence of (a), (b), (c) or a complement thereof, under at least low stringency conditions.

14. A method according to claim 4, comprising measuring the level or functional activity of individual expression products of at least 1 level three correlation stress marker gene selected from: (a) a polynucleotide comprising a nucleotide sequence that shares at least 50% sequence identity with the sequence set forth in any one of SEQ ID NO: 5, 30, 37, 48, 54, 55, 64, 66, 70, 77, 79, 85, 91, 92, 95, 96, 101, 115, 117, 118, 121, 150, 153, 158, 164, 170, 180, 186 or 198, or a complement thereof; (b) a polynucleotide comprising a nucleotide sequence that encodes a polypeptide comprising the amino acid sequence set forth in any one of SEQ ID NO: 6, 31, 49, 65, 67, 78, 80, 86, 102, 116, 122, 154, 159, 181 or 199; (c) a polynucleotide comprising a nucleotide sequence that encodes a polypeptide that shares at least 50% sequence similarity with at least a portion of the sequence set forth in SEQ ID NO: 6, 31, 49, 65, 67, 78, 80, 86, 102, 116, 122, 154, 159, 181 or 199, wherein the portion comprises at least 15 contiguous amino acid residues of that sequence; and (d) a polynucleotide comprising a nucleotide sequence that hybridizes to the sequence of (a), (b), (c) or a complement thereof, under at least low stringency conditions.

15. A method according to claim 4, comprising measuring the level or functional activity of individual expression products of at least 1 level four correlation stress marker gene selected from: (a) a polynucleotide comprising a nucleotide sequence that shares at least 50% sequence identity with the sequence set forth in any one of SEQ ID NO: 7, 15, 16, 19, 21, 24, 25, 26, 28, 35, 38, 39, 42, 46, 57, 68, 73, 81, 83, 97, 99, 107, 113, 123, 160, 165, 175, 187, 188, 194, 195 or 200, or a complement thereof; (b) a polynucleotide comprising a nucleotide sequence that encodes a polypeptide comprising the amino acid sequence set forth in any one of SEQ ID NO: 20, 22, 27, 29, 36, 42, 43, 58, 69, 74, 82, 84, 98, 100, 108, 114, 124, 166, 189 or 201; (c) a polynucleotide comprising a nucleotide sequence that encodes a polypeptide that shares at least 50% sequence similarity with at least a portion of the sequence set forth in SEQ ID NO: 20, 22, 27, 29, 36, 42, 43, 58, 69, 74, 82, 84, 98, 100, 108, 114, 124, 166, 189 or 201, wherein the portion comprises at least 15 contiguous amino acid residues of that sequence; and (d) a polynucleotide comprising a nucleotide sequence that hybridizes to the sequence of (a), (b), (c) or a complement thereof, under at least low stringency conditions.

16. A method according to claim 4, comprising measuring the level or functional activity of individual expression products of at least 1 level five correlation stress marker gene selected from: (a) a polynucleotide comprising a nucleotide sequence that shares at least 50% sequence identity with the sequence set forth in any one of SEQ ID NO: 71, 3, 9, 11, 13, 32, 33, 34, 40, 41, 50, 51, 56, 59, 62, 63, 71, 75, 87, 93, 105, 111, 119, 127, 129, 130, 131, 137, 139, 141, 143, 145, 156, 161, 167, 169, 171, 173, 176, 185, 204 or 210, or a complement thereof; (b) a polynucleotide comprising a nucleotide sequence that encodes a polypeptide comprising the amino acid sequence set forth in any one of SEQ ID NO: 2, 4, 12, 14, 60, 61, 72, 76, 88, 94, 106, 112, 120, 128, 132, 138, 140, 142, 146, 157, 162, 168, 172, 174, 177, 205 or 211; (c) a polynucleotide comprising a nucleotide sequence that encodes a polypeptide that shares at least 50% sequence similarity with at least a portion of the sequence set forth in SEQ ID NO: 2, 4, 12, 14, 60, 61, 72, 76, 88, 94, 106, 112, 120, 128, 132, 138, 140, 142, 146, 157, 162, 168, 172, 174, 177, 205 or 211, wherein the portion comprises at least 15 contiguous amino acid residues of that sequence; and (d) a polynucleotide comprising a nucleotide sequence that hybridizes to the sequence of (a), (b), (c) or a complement thereof, under at least low stringency conditions.

17. A method according to claim 4, wherein the biological sample comprises blood.

18. A method according to claim 4, wherein the biological sample comprises peripheral blood.

19. A method according to claim 4, wherein the biological sample comprises leukocytes.

20. A method according to claim 4, wherein the expression product is a RNA molecule.

21. A method according to claim 4, wherein the expression product is a polypeptide.

22. A method according to claim 4, wherein the expression product is the same as the corresponding expression product.

23. A method according to claim 4, wherein the expression product is a variant of the corresponding expression product.

24. A method according to claim 4, wherein the expression product or corresponding expression product is a target RNA or a DNA copy of the target RNA whose level is measured using at least one nucleic acid probe that hybridizes under at least low stringency conditions to the target RNA or to the DNA copy, wherein the nucleic acid probe comprises at least 15 contiguous nucleotides of a stress marker polynucleotide.

25. A method according to claim 24, wherein the measured level or abundance of the target RNA or its DNA copy is normalized to the level or abundance of a reference RNA or a DNA copy of the reference RNA that is present in the same sample.

26. A method according to claim 24, wherein the nucleic acid probe is immobilized on a solid or semi-solid support.

27. A method according to claim 24, wherein the nucleic acid probe forms part of a spatial array of nucleic acid probes.

28. A method according to claim 24, wherein the level of nucleic acid probe that is bound to the target RNA or to the DNA copy is measured by hybridization.

29. A method according to claim 24, wherein the level of nucleic acid probe that is bound to the target RNA or to the DNA copy is measured by nucleic acid amplification.

30. A method according to claim 24, wherein the level of nucleic acid probe that is bound to the target RNA or to the DNA copy is measured by nuclease protection assay.

31. A method according to claim 24, wherein the probe for detecting the stress marker polynucleotide comprises a sequence as set forth in any one of SEQ ID NO: 250-1807.

32. A method according to claim 24, wherein the expression product or corresponding expression product is a target polypeptide whose level is measured using at least one antigen-binding molecule that is immuno-interactive with the target polypeptide.

33. A method according to claim 24, wherein the measured level of the target polypeptide is normalized to the level of a reference polypeptide that is present in the same sample.

34. A method according to claim 24, wherein the antigen-binding molecule is immobilized on a solid or semi-solid support.

35. A method according to claim 24, wherein the antigen-binding molecule forms part of a spatial array of antigen-binding molecule.

36. A method according to claim 24, wherein the level of antigen-binding molecule that is bound to the target polypeptide is measured by immunoassay.

37. A method according to claim 4, wherein the expression product or corresponding expression product is a target polypeptide whose level is measured using at least one substrate for the target polypeptide with which it reacts to produce a reaction product.

38. A method according to claim 37, wherein the measured functional activity of the target polypeptide is normalized to the functional activity of a reference polypeptide that is present in the same sample.

39. A method according to claim 4, wherein a system is used to perform the method, which comprises at least one end station coupled to a base station, wherein the base station is caused (a) to receive subject data from the end station via a communications network, wherein the subject data represents parameter values corresponding to the measured or normalized level or functional activity of at least one expression product in the biological sample, and (b) to compare the subject data with predetermined data representing the measured or normalized level or functional activity of at least one corresponding expression product in the reference sample to thereby determine any difference in the level or functional activity of the expression product in the biological sample as compared to the level or functional activity of the corresponding expression product in the reference sample.

40. A method according to claim 39, wherein the base station is further caused to provide a diagnosis for the presence, absence or degree of a physiological response to stress.

41. A method according to claim 43, wherein the base station is further caused to transfer an indication of the diagnosis to the end station via the communications network.

42. A method according to claim 1, wherein detection of the aberrant expression is indicative of the presence or risk of a physiological response to stress.

43. A method according to claim 1, wherein the test subject is a horse.

44. A method for treating, preventing or inhibiting the development of stress in a subject, the method comprising detecting aberrant expression of at least one stress marker gene in the subject, and administering to the subject an effective amount of an agent that treats or ameliorates the symptoms or reverses or inhibits the development of stress in the subject, wherein the stress marker gene is selected from the group consisting of: (a) a gene having a polynucleotide expression product comprising a nucleotide sequence that shares at least 50% sequence identity with the sequence set forth in any one of SEQ ID NO: 1, 3, 4, 5, 7, 9, 11, 13, 15, 16, 17, 19, 21, 23, 24, 25, 26, 28, 29, 30, 32, 33, 34, 35, 37, 38, 39, 40, 41, 42, 44, 46, 48, 50, 51, 52, 54, 55, 56, 57, 59, 62, 63, 64, 66, 68, 70, 71, 73, 75, 77, 79, 81, 83, 85, 87, 89, 90, 91, 92, 93, 95, 96, 97, 99, 101, 103, 105, 107, 108, 109, 111, 113, 115, 117, 118, 119, 121, 123, 125, 126, 127, 129, 130, 131, 133, 135, 137, 139, 141, 143, 144, 145, 147, 148, 150, 151, 153, 155, 156, 158, 160, 161, 163, 164, 165, 167, 169, 170, 171, 173, 175, 176, 178, 180, 182, 184, 185, 186, 187, 188, 190, 192, 194, 195, 196, 198, 200, 202, 204, 206, 208, 210, 212, 214, 216, 218, 220, 222, 224, 226, 228, 230, 232, 233, 234, 236, 238, 239, 240, 241, 242, 243, 244, 246 or 248, or a complement thereof; (b) a gene having a polynucleotide expression product comprising a nucleotide sequence that encodes a polypeptide comprising the amino acid sequence set forth in any one of SEQ ID NO: 2, 6, 8, 10, 12, 14, 18, 20, 22, 27, 31, 36, 43, 45, 47, 49, 53, 58, 60, 61, 65, 67, 69, 72, 74, 76, 78, 80, 82, 84, 86, 88, 94, 98, 100, 102, 104, 106, 110, 112, 114, 116, 120, 122, 124, 128, 132, 134, 136, 138, 140, 142, 146, 149, 152, 154, 157, 159, 162, 166, 168, 172, 174, 177, 179, 181, 183, 189, 191, 193, 197, 199, 201, 203, 205, 207, 209, 211, 213, 215, 217, 219, 221, 223, 225, 227, 229, 231, 235, 237, 245, 247 or 249; (c) a gene having a polynucleotide expression product comprising a nucleotide sequence that encodes a polypeptide that shares at least 50% sequence similarity with at least a portion of the sequence set forth in SEQ ID NO: 2, 6, 8, 10, 12, 14, 18, 20, 22, 27, 31, 36, 43, 45, 47, 49, 53, 58, 60, 61, 65, 67, 69, 72, 74, 76, 78, 80, 82, 84, 86, 88, 94, 98, 100, 102, 104, 106, 110, 112, 114, 116, 120, 122, 124, 128, 132, 134, 136, 138, 140, 142, 146, 149, 152, 154, 157, 159, 162, 166, 168, 172, 174, 177, 179, 181, 183, 189, 191, 193, 197, 199, 201, 203, 205, 207, 209, 211, 213, 215, 217, 219, 221, 223, 225, 227, 229, 231, 235, 237, 245, 247 or 249, wherein the portion comprises at least 15 contiguous amino acid residues of that sequence; and (d) a gene having a polynucleotide expression product comprising a nucleotide sequence that hybridizes to the sequence of (a), (b), (c) or a complement thereof, under at least low stringency conditions.

45. An isolated stress marker polynucleotide selected from: (a) a polynucleotide comprising a nucleotide sequence that shares at least 50% sequence identity with the sequence set forth in any one of SEQ ID NO: 15, 16, 23, 24, 25, 28, 29, 32, 33, 34, 37, 38, 39, 40, 41, 50, 51, 54, 55, 62, 63, 89, 90, 91, 92, 95, 96, 107, 108, 117, 118, 125, 126, 129, 130, 143, 144, 147, 150, 155, 163, 164, 169, 170, 175, 184, 185, 186, 187, 194, 195, 232, 233, 238, 239, 240, 241, 242 or 243, or a complement thereof; (b) a polynucleotide comprising a portion of the sequence set forth in any one of SEQ ID NO: 15, 16, 23, 24, 25, 28, 29, 32, 33, 34, 37, 38, 39, 40, 41, 50, 51, 54, 55, 62, 63, 89, 90, 91, 92, 95, 96, 107, 108, 117, 118, 125, 126, 129, 130, 143, 144, 147, 150, 155, 163, 164, 169, 170, 175, 184, 185, 186, 187, 194, 195, 232, 233, 238, 239, 240, 241, 242 or 243, or a complement thereof, wherein the portion comprises at least 15 contiguous nucleotides of that sequence or complement; (c) a polynucleotide that hybridizes to the sequence of (a) or (b) or a complement thereof, under at least low stringency conditions; and (d) a polynucleotide comprising a portion of any one of SEQ ID NO: 15, 16, 23, 24, 25, 28, 29, 32, 33, 34, 37, 38, 39, 40, 41, 50, 51, 54, 55, 62, 63, 89, 90, 91, 92, 95, 96, 107, 108, 117, 118, 125, 126, 129, 130, 143, 144, 147, 150, 155, 163, 164, 169, 170, 175, 184, 185, 186, 187, 194, 195, 232, 233, 238, 239, 240, 241, 242 or 243, or a complement thereof, wherein the portion comprises at least 15 contiguous nucleotides of that sequence or complement and hybridizes to a sequence of (a), (b) or (c), or a complement thereof, under at least low stringency conditions.

46. A nucleic acid construct comprising a stress marker polynucleotide as claimed in claim 45, in operable connection with a regulatory element that is operable in a host cell.

47. An isolated host cell containing a nucleic acid construct as claimed in claim 46.

48. A probe comprising a nucleotide sequence that hybridizes under at least low stringency conditions to a polynucleotide as claimed in claim 45.

49. A probe as claimed in claim 48, wherein the probe comprise a nucleotide sequence that is capable of hybridizing to at least a portion of any one of SEQ ID NO: 15, 16, 23, 24, 25, 28, 29, 32, 33, 34, 37, 38, 39, 40, 41, 50, 51, 54, 55, 62, 63, 89, 90, 91, 92, 95, 96, 107, 108, 117, 118, 125, 126, 129, 130, 143, 144, 147, 150, 155, 163, 164, 169, 170, 175, 184, 185, 186, 187, 194, 195, 232, 233, 238, 239, 240, 241, 242 or 243 under at least low stringency conditions, wherein the portion is at least 15 nucleotides in length.

50. A probe as claimed in claim 49, comprising a sequence as set forth in any one of SEQ ID NO: 250-1807.

51. A solid or semi-solid support comprising at least one probe as claimed in claim 48 immobilized thereon.

52. Use of:
(i) one or more stress marker polynucleotides selected from the group consisting of (a) a polynucleotide comprising a nucleotide sequence that shares at least 50% (and at least 51% to at least 99% and all integer percentages in between) sequence identity with the sequence set forth in any one of SEQ ID NO: 1, 3, 4, 5, 7, 9, 11, 13, 15, 16, 17, 19, 21, 23, 24, 25, 26, 28, 29, 30, 32, 33, 34, 35, 37, 38, 39, 40, 41, 42, 44, 46, 48, 50, 51, 52, 54, 55, 56, 57, 59, 62, 63, 64, 66, 68, 70, 71, 73, 75, 77, 79, 81, 83, 85, 87, 89, 90, 91, 92, 93, 95, 96, 97, 99, 101, 103, 105, 107, 108, 109, 111, 113, 115, 117, 118, 119, 121, 123, 125, 126, 127, 129, 130, 131, 133, 135, 137, 139, 141, 143, 144, 145, 147, 148, 150, 151, 153, 155, 156, 158, 160, 161, 163, 164, 165, 167, 169, 170, 171, 173, 175, 176, 178, 180, 182, 184, 185, 186, 187, 188, 190, 192, 194, 195, 196, 198, 200, 202, 204, 206, 208, 210, 212, 214, 216, 218, 220, 222, 224, 226, 228, 230, 232, 233, 234, 236, 238, 239, 240, 241, 242, 243, 244, 246 or 248, or a complement thereof; (b) a polynucleotide comprising a nucleotide sequence that encodes a polypeptide comprising the amino acid sequence set forth in any one of SEQ ID NO: 2, 6, 8, 10, 12, 14, 18, 20, 22, 27, 31, 36, 43, 45, 47, 49, 53, 58, 60, 61, 65, 67, 69, 72, 74, 76, 78, 80, 82, 84, 86, 88, 94, 98, 100, 102, 104, 106, 110, 112, 114, 116, 120, 122, 124, 128, 132, 134, 136, 138, 140, 142, 146, 149, 152, 154, 157, 159, 162, 166, 168, 172, 174, 177, 179, 181, 183, 189, 191, 193, 197, 199, 201, 203, 205, 207, 209, 211, 213, 215, 217, 219, 221, 223, 225, 227, 229, 231, 235, 237, 245, 247 or 249; (c) a polynucleotide comprising a nucleotide sequence that encodes a polypeptide that shares at least 50% (and at least 51% to at least 99% and all integer percentages in between) sequence similarity with at least a portion of the sequence set forth in SEQ ID NO: 2, 6, 8, 10, 12, 14, 18, 20, 22, 27, 31, 36, 43, 45, 47, 49, 53, 58, 60, 61, 65, 67, 69, 72, 74, 76, 78, 80, 82, 84, 86, 88, 94, 98, 100, 102, 104, 106, 110, 112, 114, 116, 120, 122, 124, 128, 132, 134, 136, 138, 140, 142, 146, 149, 152, 154, 157, 159, 162, 166, 168, 172, 174, 177, 179, 181, 183, 189, 191, 193, 197, 199, 201, 203, 205, 207, 209, 211, 213, 215, 217, 219, 221, 223, 225, 227, 229, 231, 235, 237, 245, 247 or 249, wherein the portion comprises at least 15 contiguous amino acid residues of that sequence; and (d) a polynucleotide comprising a nucleotide sequence that hybridizes to the sequence of (a), (b), (c) or a complement thereof, under at least low stringency conditions; or
(ii) one or more probes comprising a nucleotide sequence that hybridizes under at least low stringency conditions to a stress marker polynucleotide according to (i); or
(iii) one or more stress marker polypeptides selected from the group consisting of: (1) a polypeptide comprising an amino acid sequence that shares at least 50% (and at least 51% to at least 99% and all integer percentages in between) sequence similarity with the sequence set forth in any one of SEQ ID NO: 2, 6, 8, 10, 12, 14, 18, 20, 22, 27, 31, 36, 43, 45, 47, 49, 53, 58, 60, 61, 65, 67, 69, 72, 74, 76, 78, 80, 82, 84, 86, 88, 94, 98, 100, 102, 104, 106, 110, 112, 114, 116, 120, 122, 124, 128, 132, 134, 136, 138, 140, 142, 146, 149, 152, 154, 157, 159, 162, 166, 168, 172, 174, 177, 179, 181, 183, 189, 191, 193, 197, 199, 201, 203, 205, 207, 209, 211, 213, 215, 217, 219, 221, 223, 225, 227, 229, 231, 235, 237, 245, 247 or 249; (2) a polypeptide comprising a portion of the sequence set forth in any one of SEQ ID NO: 2, 6, 8, 10, 12, 14, 18, 20, 22, 27, 31, 36, 43, 45, 47, 49, 53, 58, 60, 61, 65, 67, 69, 72, 74, 76, 78, 80, 82, 84, 86, 88, 94, 98, 100, 102, 104, 106, 110, 112, 114, 116, 120, 122, 124, 128, 132, 134, 136, 138, 140, 142, 146, 149, 152, 154, 157, 159, 162, 166, 168, 172, 174, 177, 179, 181, 183, 189, 191, 193, 197, 199, 201, 203, 205, 207, 209, 211, 213, 215, 217, 219, 221, 223, 225, 227, 229, 231, 235, 237, 245, 247 or 249, wherein the portion comprises at least 5 contiguous amino acid residues of that sequence; (3) a polypeptide comprising an amino acid sequence that shares at least 30% (and at least 31% to at least 99% and all integer percentages in between) similarity with at least 15 contiguous amino acid residues of the sequence set forth in any one of SEQ ID NO: 2, 6, 8, 10, 12, 14, 18, 20, 22, 27, 31, 36, 43, 45, 47, 49, 53, 58, 60, 61, 65, 67, 69, 72, 74, 76, 78, 80, 82, 84, 86, 88, 94, 98, 100, 102, 104, 106, 110, 112, 114, 116, 120, 122, 124, 128, 132, 134, 136, 138, 140, 142, 146, 149, 152, 154, 157, 159, 162, 166, 168, 172, 174, 177, 179, 181, 183, 189, 191, 193, 197, 199, 201, 203, 205, 207, 209, 211, 213, 215, 217, 219, 221, 223, 225, 227, 229, 231, 235, 237, 245, 247 or 249; and (4) a polypeptide comprising a portion of the sequence set forth in any one of SEQ ID NO: 2, 6, 8, 10, 12, 14, 18, 20, 22, 27, 31, 36, 43, 45, 47, 49, 53, 58, 60, 61, 65, 67, 69, 72, 74, 76, 78, 80, 82, 84, 86, 88, 94, 98, 100, 102, 104, 106, 110, 112, 114, 116, 120, 122, 124, 128, 132, 134, 136, 138, 140, 142, 146, 149, 152, 154, 157, 159, 162, 166, 168, 172, 174, 177, 179, 181, 183, 189, 191, 193, 197, 199, 201, 203, 205, 207, 209, 211, 213, 215, 217, 219, 221, 223, 225, 227, 229, 231, 235, 237, 245, 247 or 249, wherein the portion comprises at least 5 contiguous amino acid residues of that sequence and is immuno-interactive with an antigen-binding molecule that is immuno-interactive with a sequence of (1), (2) or (3); or
(iv) one or more antigen-binding molecules that are immuno-interactive with a stress marker polypeptide according to (iii),
in the manufacture of a kit for diagnosing the presence of a physiological response to stress in a subject.

53. A method according to claim 52, wherein the physiological response to stress is selected from the group consisting of: physical stress; mood disorders; anxiety disorders; inflammation; pain; chronic fatigue syndrome; stress-induced headache; cancer; human immunodeficiency virus (HIV) infections; neurodegenerative diseases; gastrointestinal diseases; eating disorders; supranuclear palsy; amyotrophic lateral sclerosis; a decrease in immune function or immunosuppression; hemorrhagic stress; stress-induced psychotic episodes; euthyroid sick syndrome; syndrome of inappropriate antidiarrhetic hormone (ADH); overeating or obesity; infertility; head traumas; spinal cord trauma; ischemic neuronal damage; excitotoxic neuronal damage; epilepsy; cardiovascular disorders; stroke; immune dysfunctions; restraint; behavioral (operant) conditioning; muscular spasms; urinary incontinence; senile dementia of the Alzheimer's type; multiinfarct dementia; amyotrophic lateral sclerosis; chemical dependencies and addictions; drug and alcohol withdrawal symptoms; osteoporosis; psychosocial dwarfism; hypoglycemia; hair loss; abnormal circadian rhythm; and disorders related to abnormal circadian rhythm.

54. A method for diagnosing the presence of a physiological response to stress in a test subject, comprising detecting in the test subject aberrant expression of at least one stress marker polynucleotide selected from the group consisting of: (a) a polynucleotide comprising a nucleotide sequence that shares at least 50% sequence identity with the sequence set forth in any one of SEQ ID NO: 1, 3, 4, 5, 7, 9, 11, 13, 15, 16, 17, 19, 21, 23, 24, 25, 26, 28, 29, 30, 32, 33, 34, 35, 37, 38, 39, 40, 41, 42, 44, 46, 48, 50, 51, 52, 54, 55, 56, 57, 59, 62, 63, 64, 66, 68, 70, 71, 73, 75, 77, 79, 81, 83, 85, 87, 89, 90, 91, 92, 93, 95, 96, 97, 99, 101, 103, 105, 107, 108, 109, 111, 113, 115, 117, 118, 119, 121, 123, 125, 126, 127, 129, 130, 131, 133, 135, 137, 139, 141, 143, 144, 145, 147, 148, 150, 151, 153, 155, 156, 158, 160, 161, 163, 164, 165, 167, 169, 170, 171, 173, 175, 176, 178, 180, 182, 184, 185, 186, 187, 188, 190, 192, 194, 195, 196, 198, 200, 202, 204, 206, 208, 210, 212, 214, 216, 218, 220, 222, 224, 226, 228, 230, 232, 233, 234, 236, 238, 239, 240, 241, 242, 243, 244, 246 or 248, or a complement thereof; (b) a polynucleotide comprising a nucleotide sequence that encodes a polypeptide comprising the amino acid sequence set forth in any one of SEQ ID NO: 2, 6, 8, 10, 12, 14, 18, 20, 22, 27, 31, 36, 43, 45, 47, 49, 53, 58, 60, 61, 65, 67, 69, 72, 74, 76, 78, 80, 82, 84, 86, 88, 94, 98, 100, 102, 104, 106, 110, 112, 114, 116, 120, 122, 124, 128, 132, 134, 136, 138, 140, 142, 146, 149, 152, 154, 157, 159, 162, 166, 168, 172, 174, 177, 179, 181, 183, 189, 191, 193, 197, 199, 201, 203, 205, 207, 209, 211, 213, 215, 217, 219, 221, 223, 225, 227, 229, 231, 235, 237, 245, 247 or 249; (c) a polynucleotide comprising a nucleotide sequence that encodes a polypeptide that shares at least 50% sequence similarity with at least a portion of the sequence set forth in SEQ ID NO: 2, 6, 8, 10, 12, 14, 18, 20, 22, 27, 31, 36, 43, 45, 47, 49, 53, 58, 60, 61, 65, 67, 69, 72, 74, 76, 78, 80, 82, 84, 86, 88, 94, 98, 100, 102, 104, 106, 110, 112, 114, 116, 120, 122, 124, 128, 132, 134, 136, 138, 140, 142, 146, 149, 152, 154, 157, 159, 162, 166, 168, 172, 174, 177, 179, 181, 183, 189, 191, 193, 197, 199, 201, 203, 205, 207, 209, 211, 213, 215, 217, 219, 221, 223, 225, 227, 229, 231, 235, 237, 245, 247 or 249, wherein the portion comprises at least 15 contiguous amino acid residues of that sequence; and (d) a polynucleotide comprising a nucleotide sequence that hybridizes to the sequence of (a), (b), (c) or a complement thereof, under at least low stringency conditions.
